(19) United States
(12) Patent Application Publication
(10) Pub. No.: US 2026/0117176 A1
(43) Pub. Date: Apr. 30, 2026

(54) MODIFIED IMMUNE EFFECTOR CELLS WITH IMPROVED EFFICACY

(71) Applicant: Beam Therapeutics Inc., Cambridge, MA (US)

(72) Inventors: Leila Peraro, Cambridge, MA (US); Sami Kebede, Cambridge, MA (US)

(73) Assignee: Beam Therapeutics Inc., Cambridge, MA (US)

(21) Appl. No.: 19/354,669

(22) Filed: Oct. 9, 2025

Related U.S. Application Data
(63) Continuation of application No. PCT/US2024/018668, filed on Mar. 6, 2024.
(60) Provisional application No. 63/495,682, filed on Apr. 12, 2023.

(51) Int. Cl. C12N 5/0783; A61K 40/11; A61K 40/31; A61K 40/42; A61P 35/00; C07K 16/28; C12N 9/78; C12N 15/11

(52) U.S. Cl. CPC C12N 5/0636; A61K 40/11; A61K 40/31; A61K 40/4211; A61K 40/4212; A61P 35/00; C07K 16/2803; C12N 9/78; C12N 15/11; C12Y 305/04004; C07K 2317/622; C07K 2319/02; C12N 2310/20; C12N 2510/00

(57) ABSTRACT

Multiplex base edited chimeric antigen receptor (CAR)-expressing immune effector cells (e.g., T or NK cells) having increased resistance to development of an exhausted phenotype (e.g., increased cytotoxicity, proliferation, survival, and/or cytokine production) after repeated or continuous stimulation by an antigen relative to unedited CAR immune effector cells, compositions containing the cells, methods for the preparation of the cells, and methods for use of the cells in treating a disease or disorder (e.g., an autoimmune disorder or a neoplasia, such as a leukemia).

### CROSS REFERENCE TO RELATED APPLICATIONS

[0001] This application is a continuation under 35 U.S.C. § 111(a) of PCT International Patent Application No. PCT/US2024/018668, filed Mar. 6, 2024, designating the United States and published in English, which claims priority to and the benefit of U.S. Provisional Application No. 63/495,682, filed Apr. 12, 2023, the entire contents of each of which are incorporated by reference herein.

### SEQUENCE LISTING

[0002] This application contains a Sequence Listing which has been submitted electronically in XML format and is hereby incorporated by reference in its entirety. The Sequence Listing XML file, created on Mar. 6, 2024, is named 180802-055402_PCT_SL.xml and is 2,772,339 bytes in size.

### BACKGROUND OF THE DISCLOSURE

[0003] Autologous and allogeneic immunotherapies are approaches for treating a disease or disorder (e.g., a neoplasia or an autoimmune disease) in which immune cells (e.g., T cells) expressing chimeric antigen receptors are administered to a subject. To generate an immune cell that expresses a chimeric antigen receptor (CAR), the immune cell is first collected from the subject (autologous) or a donor separate from the subject receiving treatment (allogeneic) and genetically modified to express the chimeric antigen receptor. The resulting cell expresses the chimeric antigen receptor on its cell surface (e.g., CAR-T cell), and upon administration to the subject, the chimeric antigen receptor binds to the antigen expressed by a cell associated with the disease or disorder. This interaction with the antigen activates the CAR-expressing immune cell (e.g., a CAR-T cell), which then kills, inactivates, or neutralizes cells or molecules associated with the disease or disorder. But for autologous or allogeneic cell therapy to be effective and efficient, significant conditions and cellular responses, such as immune cell signaling inhibition or immune cell exhaustion, must be overcome or avoided. Autologous cell therapies have a number of disadvantages, including long manufacturing times and the requirement that the patient cells are suitable despite previous therapies or disease state. Challenges are also associated with allogeneic cell therapy, including graft-versus-host disease (GVHD), and host rejection of CAR-T cells. Currently, CAR-expressing immune effector cells develop an exhausted phenotype (e.g., reduced cytotoxicity) when repeatedly or continuously contacted with a target antigen. Thus, there is a significant need for techniques for improving immune effector cell resistance to exhaustion associated with continuous or repeated exposure to a target antigen in vivo.

### SUMMARY OF THE DISCLOSURE

[0004] As described below, the present disclosure features multiplex base edited chimeric antigen receptor (CAR)-expressing immune effector cells (e.g., T or NK cells) having increased resistance to development of an exhausted phenotype (e.g., increased cytotoxicity, proliferation, survival, and/or cytokine production) after repeated or continuous stimulation by an antigen relative to unedited CAR immune effector cells, compositions containing the cells, methods for the preparation of the cells, and methods for use of the cells in treating a disease or disorder (e.g., an autoimmune disorder or a neoplasia, such as a leukemia).

[0005] In one aspect, the disclosure features a method for producing a modified immune effector cell having reduced exhaustion after antigen exposure relative to an unedited immune effector cell. The method involves contacting the cell with (i) a base editor, or a polynucleotide encoding the base editor. The base editor contains a programmable DNA binding domain and a deaminase domain. The method further involves contacting the cell with (ii) a guide polynucleotide, or a polynucleotide encoding the guide polynucleotide. The guide polynucleotide directs the base editor to effect a nucleobase alteration in a polynucleotide encoding a polypeptide selected from one or more of ARID1A, BATF, CBLB, CD5, Chop, CISH, DCK, DGKα, DGKζ, DHX37, DNMT3A, EIF2A, FLI-1, ID3, IKZF2, IL-6, PFN1, PRDM1, PRKACA, PTP1B, PTPN6, RASA2, Regnase-1, Roquin-1, SOCS1, SOX4, TLE, TMEM184B, and TMEM222. The method also involves contacting the cell with (iii) a guide polynucleotide, or a polynucleotide encoding the guide polynucleotide.

[0006] The guide polynucleotide directs the base editor to effect a nucleobase alteration in a polynucleotide encoding a polypeptide selected from one or more of beta-2-microglobulin (B2M), cluster of differentiation 3-epsilon (CD3e), cluster of differentiation 3-gamma (CD3g), class II major histocompatibility complex transactivator (CIITA), programmed cell death 1 (PD1), and T cell receptor constant region (TRAC). Each nucleobase alteration effects a reduction in expression of the encoded polypeptide, thereby producing the modified immune effector cell.

[0007] In another aspect, the disclosure features a modified immune cell having reduced exhaustion after antigen exposure relative to an unedited immune effector cell. The modified immune cell contains a nucleobase alteration that reduces or eliminates expression of (i) a polypeptide selected from one or more of ARID1A, BATF, CBLB, CD5, Chop, CISH, DCK, DGKα, DGKζ, DHX37, DNMT3A, EIF2A, FLI-1, ID3, IKZF2, IL-6, PFN1, PRDM1, PRKACA, PTP1B, PTPN6, RASA2, Regnase-1, Roquin-1, SOCS1, SOX4, TLE, TMEM184B, and TMEM222. The nucleobase alteration also reduces or eliminates expression of (ii) a polypeptide selected from one or more of beta-2-microglobulin (B2M), cluster of differentiation 3-epsilon (CD3e), cluster of differentiation 3-gamma (CD3g), class II major histocompatibility complex transactivator (CIITA), programmed cell death 1 (PD1), and T cell receptor constant region (TRAC).

[0008] In another aspect, the disclosure features a modified immune effector cell having reduced exhaustion after antigen exposure relative to an unedited immune effector cell. The modified immune effector cell expresses a chimeric antigen receptor targeting an antigen associated with a disease or disorder. The modified immune effector cell has reduced or undetectable expression of (i) one or more of ARID1A, BATF, CBLB, CD5, Chop, CISH, DCK, DGKα, DGKζ, DHX37, DNMT3A, EIF2A, FLI-1, ID3, IKZF2, IL-6, PFN1, PRDM1, PRKACA, PTP1B, PTPN6, RASA2, Regnase-1, Roquin-1, SOCS1, SOX4, TLE, TMEM184B, and TMEM222. The modified immune cell also has reduced or undetectable expression of (ii) one or more of beta-2-microglobulin (B2M), cluster of differentiation 3-epsilon (CD3e), cluster of differentiation 3-gamma (CD3g), class II major histocompatibility complex transactivator (CIITA), programmed cell death 1 (PD1), and T cell receptor constant region (TRAC).

[0009] In another aspect, the disclosure features a modified immune cell having increased efficacy relative to an unedited immune effector cell produced according to the method of any aspect of the disclosure delimited herein, or embodiments thereof.

[0010] In another aspect, the disclosure features a base editor system that contains (i) a base editor, or a polynucleotide encoding the base editor. The base editor contains a programmable DNA binding domain and a deaminase domain. The base editor system also contains (ii) a guide polynucleotide, or a polynucleotide encoding the guide polynucleotide. The guide polynucleotide directs the base editor to effect a nucleobase alteration in a polynucleotide encoding a polypeptide selected from one or more of ARID1A, BATF, CBLB, CD5, Chop, CISH, DCK, DGKα, DGKζ, DHX37, DNMT3A, EIF2A, FLI-1, ID3, IKZF2, IL-6, PFN1, PRDM1, PRKACA, PTP1B, PTPN6, RASA2, Regnase-1, Roquin-1, SOCS1, SOX4, TLE, TMEM184B, and TMEM222. The base editor system further contains (iii) a guide polynucleotide, or a polynucleotide encoding the guide polynucleotide. The guide polynucleotide directs the base editor to effect a nucleobase alteration in a polynucleotide encoding a polypeptide selected from one or more of beta-2-microglobulin (B2M), cluster of differentiation 3-epsilon (CD3e), cluster of differentiation 3-gamma (CD3g), class II major histocompatibility complex transactivator (CIITA), programmed cell death 1 (PD1), and T cell receptor constant region (TRAC).

[0011] In another aspect, the disclosure features a cell containing the base editor system of any aspect of the disclosure delimited herein, or embodiments thereof.

[0012] In another embodiment, the disclosure features a vector or set of vectors containing (i) a polynucleotide encoding a base editor. The base editor contains a programmable DNA binding domain and a deaminase domain. The vector or set of vectors also contains (ii) a guide polynucleotide, or a polynucleotide encoding the guide polynucleotide. The guide polynucleotide directs the base editor to effect a nucleobase alteration in a polynucleotide encoding a polypeptide selected from one or more of ARID1A, BATF, CBLB, CD5, Chop, CISH, DCK, DGKα, DGKζ, DHX37, DNMT3A, EIF2A, FLI-1, ID3, IKZF2, IL-6, PFN1, PRDM1, PRKACA, PTP1B, PTPN6, RASA2, Regnase-1, Roquin-1, SOCS1, SOX4, TLE, TMEM184B, and TMEM222. The vector or set of vectors also contains (iii) a guide polynucleotide, or a polynucleotide encoding the guide polynucleotide. The guide polynucleotide directs the base editor to effect a nucleobase alteration in a polynucleotide encoding a polypeptide selected from one or more of beta-2-microglobulin (B2M), cluster of differentiation 3-epsilon (CD3e), cluster of differentiation 3-gamma (CD3g), class II major histocompatibility complex transactivator (CIITA), programmed cell death 1 (PD1), and T cell receptor constant region (TRAC).

[0013] In another aspect, the disclosure features a pharmaceutical composition containing an effective amount of the modified immune cell, the base editor system, the cell, or the vector of any aspect of the disclosure delimited herein, or embodiments thereof, and a pharmaceutically acceptable excipient.

[0014] In another aspect, the disclosure features a pharmaceutical composition containing (i) a base editor, or a polynucleotide encoding the base editor. The base editor contains a programmable DNA binding domain and a deaminase domain. The pharmaceutical composition also contains (ii) a guide polynucleotide, or a polynucleotide encoding the guide polynucleotide. The guide polynucleotide directs the base editor to effect a nucleobase alteration in a polynucleotide encoding a polypeptide selected from one or more of ARID1A, BATF, CBLB, CD5, Chop, CISH, DCK, DGKα, DGKζ, DHX37, DNMT3A, EIF2A, FLI-1, ID3, IKZF2, IL-6, PFN1, PRDM1, PRKACA, PTP1B, PTPN6, RASA2, Regnase-1, Roquin-1, SOCS1, SOX4, TLE, TMEM184B, and TMEM222. The pharmaceutical composition also contains (iii) a guide polynucleotide, or a polynucleotide encoding the guide polynucleotide. The guide polynucleotide directs the base editor to effect a nucleobase alteration in a polynucleotide encoding a polypeptide selected from one or more of beta-2-microglobulin (B2M), cluster of differentiation 3-epsilon (CD3e), cluster of differentiation 3-gamma (CD3g), class II major histocompatibility complex transactivator (CIITA), programmed cell death 1 (PD1), and T cell receptor constant region (TRAC).

[0015] In another aspect, the disclosure features a method of treating a disease or disorder in a subject. The method involves administering to the subject an effective amount of a modified immune cell, the cell, or the pharmaceutical composition of any aspect of the disclosure delimited herein, or embodiments thereof.

[0016] In another aspect, the disclosure features a kit containing the modified immune cell, the cell, the pharmaceutical composition, or the composition of any aspect of the disclosure delimited herein, or embodiments thereof, for use in the method of any aspect of the disclosure delimited herein, or embodiments thereof.

[0017] In another aspect, the disclosure features a modified immune cell having reduced exhaustion after antigen exposure relative to an unedited immune effector cell, where the modified immune cell is produced according to the method of any aspect of the disclosure, or embodiments thereof.

[0018] In another aspect, the disclosure features a method for producing a modified immune effector cell having reduced exhaustion after antigen exposure relative to an unedited immune effector cell. The method involves contacting the cell with (i) a base editor, or a polynucleotide encoding the base editor. The base editor contains a programmable DNA binding domain and a deaminase domain. The method further involves contacting the cell with (ii) a guide polynucleotide, or a polynucleotide encoding the guide polynucleotide. The the guide polynucleotide directs the base editor to effect a nucleobase alteration in a polynucleotide encoding a Roquin-1 polypeptide. The method also involves contacting the cell with (iii) a guide polynucleotide, or a polynucleotide encoding the guide polynucleotide. The guide polynucleotide directs the base editor to effect a nucleobase alteration in a polynucleotide encoding a polypeptide selected from one or more of beta-2-microglobulin (B2M), cluster of differentiation 3-epsilon (CD3e), cluster of differentiation 3-gamma (CD3g), class II major histocompatibility complex transactivator (CIITA), programmed cell death 1 (PD1), and T cell receptor constant region (TRAC). Each nucleobase alteration effects a reduction in expression of the encoded polypeptide, thereby producing the modified immune effector cell.

[0019] In another aspect, the present disclosure features a method for reducing or eliminating the presence of a neoplasia in a subject. The method involves administering to the subject a cell produced according to the method of any aspect of the disclosure, or embodiments thereof, where the cell expresses a chimeric antigen receptor targeting an antigen associated with the neoplasia.

[0020] In any aspect of the disclosure delimited herein, or embodiments thereof, the method further involves expressing one or two chimeric antigen receptors in the cell.

[0021] In any aspect of the disclosure delimited herein, or embodiments thereof, the method further involves contacting the cell with a guide polynucleotide, or a polynucleotide encoding the guide polynucleotide. The guide polynucleotide directs the base editor to effect a nucleobase alteration in a polynucleotide encoding an antigen(s) bound by the chimeric antigen receptor(s). The nucleobase alteration effects a reduction in expression of the antigen.

[0022] In any aspect of the disclosure delimited herein, or embodiments thereof, the base editing reduces expression of a CISH, CBLB, SOCS1, Roquin-1, DNMT3A, FLI-1, RASA2, Regnase-1, CD5, or PDP1B polypeptide in the cell. In any aspect of the disclosure delimited herein, or embodiments thereof, the base editing reduces expression of a TRAC, B2M, and CIITA polypeptide in the cell. In any aspect of the disclosure delimited herein, or embodiments thereof, the base editing reduces expression of a CD3g, B2M, and CIITA polypeptide in the cell. In any aspect of the disclosure delimited herein, or embodiments thereof, the base editing reduces expression of PD1 in the cell.

[0023] In any aspect of the disclosure delimited herein, or embodiments thereof, the guide polynucleotide of (ii) is selected from one or more of EF1, EF2, EF3, EF4, EF5, EF6, EF7, EF8, EF9, EF10, EF11, EF12, EF13, EF14, EF15, EF16, EF17, EF18, EF19, EF20, EF21, EF22, EF23, EF24, EF25, EF26, EF27, EF28, EF29, EF46, EF47, EF48, EF49, EF50, EF51, EF52, EF53, EF54, EF55, EF56, EF57, EF58, EF59, EF60, EF61, EF62, EF63, EF64, EF65, EF66, EF67, EF68, EF69, EF70, EF71, EF72, EF73, EF74, EF75, EF76, EF77, EF85, EF86, EF87, EF88, EF89, EF90, EF91, EF92, EF93, EF94, EF95, EF96, EF97, EF98, EF99, EF100, EF101, EF102, EF103, EF104, EF105, EF106, EF107, EF108, EF109, EF110, EF111, EF112, EF113, EF114, EF115, EF116, EF117, EF118, EF119, and EF120. In any aspect of the disclosure delimited herein, or embodiments thereof, the guide polynucleotide of (ii) is selected from one or more of EF1, EF2, EF3, EF4, EF7, EF8, EF14, EF15, EF20, EF24, EF25, EF46, EF47, EF48, EF49, EF50, EF51, EF52, EF54, EF55, EF56, EF57, EF58, EF59, EF60, EF61, EF62, EF63, EF64, EF65, EF66, EF67, EF70, EF74, EF76, EF85, EF86, EF91, EF94, EF95, EF96, EF97, EF98, EF99, EF100, EF101, EF102, EF103, EF104, EF105, EF106, EF107, EF108, EF109, EF110, EF111, EF112, EF113, EF114, and EF117. In any aspect of the disclosure delimited herein, or embodiments thereof, the guide polynucleotide of (ii) is selected from one or more of EF1, EF2, EF4, EF7, EF8, EF15, EF20, EF25, EF96, EF94.

[0024] In any aspect of the disclosure delimited herein, or embodiments thereof, the nucleobase alterations effect an alteration in the ratio of CD4+ to CD8+ cells in a population of the modified immune effector cells following one or more exposures to antigen relative to a population of unedited immune cells. In any aspect of the disclosure delimited herein, or embodiments thereof, the nucleobase alterations effect an increase in the proportion of CD4+ cells in the population of the modified immune effector cells following one or more exposures to antigen relative to a population of unedited immune cells. In any aspect of the disclosure delimited herein, or embodiments thereof, the nucleobase alterations effect an increase in CD25, ICOS, OX40, and/or CD28 expression in the modified immune effector cell following one or more exposures to antigen relative to an unedited immune cell. In any aspect of the disclosure delimited herein, or embodiments thereof, the nucleobase alterations effect an increase in cytokine secretion and/or intracellular levels in the modified immune effector cell following one or more exposures to antigen relative to an unedited immune cell. In embodiments, the cytokine is selected from one or more of cytokines granzyme B (GZMB), interferon gamma (IFNg), interleukin-2 (IL-2), and tumor necrosis factor alpha (TNFa). In any aspect of the disclosure delimited herein, or embodiments thereof, the nucleobase alterations effect an increase in EOMES+ and/or T-bet− cells in a population of the modified immune effector cells following one or more exposures to antigen relative to a population of unedited immune cells. In any aspect of the disclosure delimited herein, or embodiments thereof, the nucleobase alterations effect an increase in marker of proliferation KI67 expression in the modified immune effector cell following one or more exposures to antigen relative to an unedited immune cell. In any aspect of the disclosure delimited herein, or embodiments thereof, the base editing reduces expression of a DCK, DGKα, DGKζ, EIF2A, RASA2, PFN1, or ARID1A polypeptide in the cell, thereby increasing immune cell proliferation following one or more exposures to antigen relative to an unedited immune cell. In any aspect of the disclosure delimited herein, or embodiments thereof, the base editing reduces expression of a Roquin-1 polypeptide in the cell, thereby increasing antigen-dependent proliferation following one or more exposures to antigen relative to an unedited immune cell. In any aspect of the disclosure delimited herein, or embodiments thereof, the base editing reduces expression of a CISH, CBLB, PTP1B, SOCS1, Roquin-1, DNMT3A, FLI1, Chop, or Regnase-1 polypeptide in the cell, thereby increasing cytotoxic capacity following one or more exposures to antigen relative to an unedited immune cell. In any aspect of the disclosure delimited herein, or embodiments thereof, the base editing reduces expression of a DCK, CD5, DGKα, DGKζ, DHX37, EIF2A, ID3, IKZF2, IL-6, PFN1, PRDM1, PRKACA, PTPN6, RASA2, SOX4, TLE, TMEM184B, or TMEM222 polypeptide in the cell, thereby increasing cytotoxic capacity following one or more exposures to antigen relative to an unedited immune cell. In any aspect of the disclosure delimited herein, or embodiments thereof, the base editing reduces expression of a CISH, FLI-1, SOCS1, or Roquin-1 polypeptide in the cell, thereby increasing cytotoxic capacity following one or more exposures to antigen relative to an unedited immune cell. In any aspect of the disclosure delimited herein, or embodiments thereof, the base editing reduces expression of a CISH, CBLB, SOCS1, Roquin-1, or DNMT3A polypeptide in the cell, thereby increasing KI67 polypeptide expression, reducing T-bet polypeptide expression, and/or increasing EOMES expression in the cell following one or more exposures to antigen relative to an unedited immune cell. In any aspect of the disclosure delimited herein, or embodiments thereof, the base editing reduces expression of a CISH, SOCS1, or Roquin-1 polypeptide in the cell, thereby increasing secretion of granzyme B (GZMB), interferon gamma (IFNg), interleukin-2 (IL-2), or tumor necrosis factor alpha (TNFa) following one or more exposures to antigen relative to an unedited immune cell. In any aspect of the disclosure delimited herein, or embodiments thereof, the one or more exposures to antigen is, or is at least 1, 2, 3, 4, 5, 6, 7, 8, 9, or 10 exposures.

[0025] In any aspect of the disclosure delimited herein, or embodiments thereof, the immune cell is an NK cell or T cell.

[0026] In any aspect of the disclosure delimited herein, or embodiments thereof, the base editing efficiency for the nucleobase alterations is at least about 80%.

[0027] In any aspect of the disclosure delimited herein, or embodiments thereof, the immune cell further contains one or two chimeric antigen receptor targeting one or two antigen associated with a disease or disorder. In any aspect of the disclosure delimited herein, or embodiments thereof, the modified immune cell contains reduced or undetectable expression of an antigen(s) bound by the chimeric antigen receptor(s).

[0028] In any aspect of the disclosure delimited herein, or embodiments thereof, the disease is a neoplasia. In embodiments, the neoplasia is a lymphoma. In embodiments, the lymphoma is a mantle cell lymphoma or a B cell lymphoma.

[0029] In any aspect of the disclosure delimited herein, or embodiments thereof, the modified immune cell has reduced or undetectable levels of expression of a CISH, CBLB, SOCS1, Roquin-1, DNMT3A, FLI-1, RASA2, Regnase-1, CD5, or PDP1B polypeptide in the cell. In any aspect of the disclosure delimited herein, or embodiments thereof, the immune cell has reduced or undetectable levels of expression of a TRAC, B2M, and CIITA polypeptide. In any aspect of the disclosure delimited herein, or embodiments thereof, the modified immune cell has reduced or undetectable levels of expression of a CD3g, B2M, and CIITA polypeptide. In any aspect of the disclosure delimited herein, or embodiments thereof, the modified immune cell has reduced or undetectable levels of expression of PD1. In any aspect of the disclosure delimited herein, or embodiments thereof, a population of the modified immune cells has an alteration in the ratio of CD4+ to CD8+ cells following one or more exposures to antigen relative to a population of unedited immune cells. In any aspect of the disclosure delimited herein, or embodiments thereof, a population of the modified immune cells has an increase in the proportion of CD4+ cells following one or more exposures to antigen relative to a population of unedited immune cells. In any aspect of the disclosure delimited herein, or embodiments thereof, the modified immune cell has an increase in CD25, ICOS, OX40, and/or CD28 expression following one or more exposures to antigen relative to an unedited immune cell. In any aspect of the disclosure delimited herein, or embodiments thereof, the modified immune cell has an increase in cytokine secretion and/or intracellular levels following one or more exposures to antigen relative to an unedited immune cell. In embodiments, the cytokine is selected from one or more of cytokines granzyme B (GZMB), interferon gamma (IFNg), interleukin-2 (IL-2), and tumor necrosis factor alpha (TNFa). In any aspect of the disclosure delimited herein, or embodiments thereof, a population of the modified immune cells has an increase in EOMES+ and/or T-bet− cells following one or more exposures to antigen relative to a population of unedited immune cells. In any aspect of the disclosure delimited herein, or embodiments thereof, the modified immune cell has an increase in marker of proliferation KI67 expression following one or more exposures to antigen relative to an unedited immune cell. In any aspect of the disclosure delimited herein, or embodiments thereof, the immune cell has reduced expression of a DCK, DGKα, DGKζ, EIF2A, RASA2, PFN1, or ARID1A polypeptide, and has increased immune cell proliferation following one or more exposures to antigen relative to an unedited immune cell. In any aspect of the disclosure delimited herein, or embodiments thereof, the immune cell has reduced expression of Roquin-1 polypeptide and has increased antigen-dependent proliferation following one or more exposures to antigen relative to an unedited immune cell. In any aspect of the disclosure delimited herein, or embodiments thereof, the immune cell has reduced expression of a CISH, CBLB, PTP1B, SOCS1, Roquin-1, DNMT3A, FLI1, Chop, or Regnase-1 polypeptide, and has increased cytotoxic capacity following one or more exposures to antigen relative to an unedited immune cell. In any aspect of the disclosure delimited herein, or embodiments thereof, the immune cell has reduced expression of a DCK, CD5, DGKa, DGKz, DHX37, EIF2A, ID3, IKZF2, IL-6, PFN1, PRDM1, PRKACA, PTPN6, RASA2, SOX4, TLE, TMEM184B, or TMEM222 polypeptide, and has increased cytotoxic capacity following one or more exposures to antigen relative to an unedited immune cell. In any aspect of the disclosure delimited herein, or embodiments thereof, the immune cell has reduced expression of a CISH, FLI-1, SOCS1, or Roquin-1 polypeptide in the cell, and has increased cytotoxic capacity following one or more exposures to antigen relative to an unedited immune cell. In any aspect of the disclosure delimited herein, or embodiments thereof, the immune cell has reduced expression of a CISH, CBLB, SOCS1, Roquin-1, or DNMT3A polypeptide in the cell, and has increased KI67 polypeptide expression, reducing T-bet polypeptide expression, and/or increasing EOMES expression in the cell following one or more exposures to antigen relative to an unedited immune cell. In any aspect of the disclosure delimited herein, or embodiments thereof, the immune cell has reduced expression of a CISH, SOCS1, or Roquin-1 polypeptide in the cell, and has increased secretion of granzyme B (GZMB), interferon gamma (IFNg), interleukin-2 (IL-2), or tumor necrosis factor alpha (TNFa) following one or more exposures to antigen relative to an unedited immune cell.

[0030] In any aspect of the disclosure delimited herein, or embodiments thereof, the guide polynucleotide of (ii) contains a polynucleotide sequence with at least about 85% sequence identity to a sequence selected from those listed in Table 1 or Table 2A, or a variant thereof having an extension or truncation 1, 2, 3, 4, or 5 nucleotides in length at the 3′ and/or 5′ end. In any aspect of the disclosure delimited herein, or embodiments thereof, the guide polynucleotide of (ii) contains a polynucleotide sequence with at least about 85% sequence identity to a sequence selected from those listed in Table 1 or Table 2A, or a variant thereof having an extension or truncation 1, 2, 3, 4, or 5 nucleotides in length at the 3′ and/or 5′ end.

[0031] In any aspect of the disclosure delimited herein, or embodiments thereof, the vector or set of vectors contains a lentiviral vector or adeno-associated viral vector.

[0032] In any aspect provided herein, or embodiments thereof, the method is not a process for modifying the germline genetic identity of human beings.

[0033] In any aspect provided herein, or embodiments thereof, the base editing reduces expression of a Roquin-1, DGKζ, or FLI-1 polypeptide in the cell. In any aspect provided herein, or embodiments thereof, the modified immune cell has reduced or undetectable levels of expression of a Roquin-1, DGKζ, or FLI-1 polypeptide in the cell.

[0034] In any aspect provided herein, or embodiments thereof, the guide polynucleotide contains a spacer containing, the following nucleotide sequence AUGUACCUGGUCCAAGGAAC (SEQ ID NO: 456). In any aspect provided herein, or embodiments thereof, the guide polynucleotide contains the following nucleotide sequence:

(SEQ ID NO: 427)
AUGUACCUGGUCCAAGGAACGUUUUAGAGCUAGAAAUAGCAAGUU
AAAAUAAGGCUAGUCCGUUAUCAACUUGAAAAAGUGGCACCGAGU
CGGUGCUUUU.

[0035] In any aspect provided herein, or embodiments thereof, the base editing reduces expression of the Roquin-1 polypeptide in the cell. In any aspect provided herein, or embodiments thereof, the method is associated with improved suppression of tumor recurrence in the subject relative to a subject administered an unedited immune cell expressing the chimeric antigen receptor. In any aspect provided herein, or embodiments thereof, the cells have increased maintenance of a central memory phenotype relative to unedited immune cells administered to a subject and expressing the chimeric antigen receptor.

### Definitions

[0036] Unless defined otherwise, all technical and scientific terms used herein have the meaning commonly understood by a person skilled in the art to which this disclosure belongs. The following references provide one of skill with a general definition of many of the terms used in this disclosure: Singleton et al., Dictionary of Microbiology and Molecular Biology (2nd ed. 1994); The Cambridge Dictionary of Science and Technology (Walker ed., 1988); The Glossary of Genetics, 5th Ed., R. Rieger et al. (eds.), Springer Verlag (1991); and Hale & Marham, The Harper Collins Dictionary of Biology (1991). As used herein, the following terms have the meanings ascribed to them below, unless specified otherwise.

[0037] By “AT-rich interaction domain-containing protein 1A (ARID1A) polypeptide” is meant a protein having at least about 85% amino acid sequence identity to GenBank Accession No. BAA23269.1, which is provided below, or a fragment thereof having immunomodulatory activity.

>BAA23269.1 B120 [Homo sapiens]
(SEQ ID NO: 826)
MDQMGKMRPQPYGGTNPYSQQQGPPSDPQQGHGYPGQPYGSQTPQ
RYPMTVQGRAQSAMGGLSYTQQIPPYGQQGPSGYGQQGQTPYYNQ
QSPHPQQQQPPYSQQPPSQTPHAQPSYQQQPQSQPPQLQSSQPPY
SQQPSQPPHQQSPAPYPSQQSTTQQHPQSQPPYSQPQAQSPYQQQ
QPQQPAPSTLSQQAAYPQPQSQQSQQTAYSQQRFPPPQELSQDSF
GSQASSAPSMTSSKGGQEDMNLSLQSRPSSLPDLSGSIDDLPMGT
EGALSPGVSTSGISSSQGEQSNPAQSPFSPHTSPHLPGIRGPSPS
PVGSPASVAQSRSGPLSPAAVPGNQMPPRPPSGSSDSIMHPSMNQ
SSIAQDRGYMQRNSQMPQYSSPQPGSALSPRQLSGGQIHTGMGSY
QQNSMGSYGPQGGQYGPQGGYPRQPNYNALPNANYPSAGMAGGIN
PMGAGGQMHGQPGIPPYGTLPPGRMSHASMGNRPYGPNNGQYATS
GWVRDVSPPGGMNRKTQETAVAMHVAANSIQNRPPGYPNMNQGGM
MGTGPPYGQGINSMAGMINPQGPPYSMGGTMANNSAGMAASPEMM
GLGDVKLTPATKMNNKADGTPKTESKSKKSSSSTTTNEKITKLYE
LGGGPERKMWVDRYLAFTEEKAMGMTNLPAVGRKPLDLYRLYVSV
KEIGGLTQVNKNKKWRELATNLNVGTSSSAASSLKKQYIQCLYAF
ECKIERGEDPPPDIFAAADSKKSQPKIQPPSPAGSGSMQGPQTPQ
STSSSMAEGGDLKPPTPASTPHSQIPPLPGMSRSNSVGIQDAFND
GSDSTFQKRNSMTPNPGYQPSMNTSDMMGRMSYEPNKDPYGSMRK
APGSDPFMSSGQGPNGGMGDPYSRAAGPGLGNVAMGPRQHYPYGG
PYDRVRTEPGIGPEGNMSTGAPQSNLMPSNPDSGMYSPSRYPPQQ
QQQQQQRHDSYGNQFSTQGTPSGSPFPSQQTTMYQQQQQNYKRPM
DGTYGPPAKRHEGEMYSVPYSTGQGLPQQQQLPPAQPQPASQPQA
AQPSPQQDVYNQYGNAYPATATAATERRPAGGPQNQFPFQFGRDR
VSAPPGTNAQQNMPPQMMGGPIQASAEVAQQGTMWQGRNDMTYNY
ANRQSTALPPRAPPIMA.

[0038] By “AT-rich interaction domain-containing protein 1A (ARID1A) polynucleotide” is meant a polynucleotide encoding a ARID1A polypeptide, as well as the introns, exons, 3′ untranslated regions, 5′ untranslated regions, and regulatory sequences associated with its expression, or fragments thereof. In embodiments, a ARID1A polynucleotide is the genomic sequence, cDNA, mRNA, or gene associated with and/or required for ARID1A expression. An exemplary ARID1A nucleic acid sequence is provided below (GenBank Accession No. AB001895.1:288-3716).

>AB001895.1:288-3716 Homo sapiens mRNA for B120, Complete Cds
ATGGATCAGATGGGCAAGATGAGACCTCAGCCATATGGCGGGACTAACCCATACTCGCAGCA ACAGGGACCTCCGTCAGACCCGCAGCAAGGACATGGGTACCCAGGGCAGCCATACGGGTCCC AGACCCCGCAGCGGTACCCGATGACCGTGCAGGGCCGGGCGCAGAGTGCCATGGGCGGCCTC TCTTATACACAGCAGATTCCTCCTTATGGACAACAAGGCCCCAGCGGGTATGGTCAACAGGG CCAGACTCCATATTACAACCAGCAAAGTCCTCACCCTCAGCAGCAGCAGCCACCCTACTCCC AGCAACCACCGTCCCAGACCCCTCATGCCCAACCTTCGTATCAGCAGCAGCCACAGTCTCAA CCACCACAGCTCCAGTCCTCTCAGCCTCCATACTCCCAGCAGCCATCCCAGCCTCCACATCA GCAGTCCCCGGCTCCATACCCCTCCCAGCAGTCGACGACACAGCAGCACCCCCAGAGCCAGC CCCCCTACTCACAGCCACAGGCTCAGTCTCCTTACCAGCAGCAGCAACCTCAGCAGCCAGCA CCCTCGACGCTCTCCCAGCAGGCTGCGTATCCTCAGCCCCAGTCTCAGCAGTCCCAGCAAAC TGCCTATTCCCAGCAGCGCTTCCCTCCACCGCAGGAGCTATCTCAAGATTCATTTGGGTCTC AGGCATCCTCAGCCCCCTCAATGACCTCCAGTAAGGGAGGGCAAGAAGATATGAACCTGAGC CTTCAGTCAAGACCCTCCAGCTTGCCTGATCTATCTGGTTCAATAGATGACCTCCCCATGGG GACAGAAGGAGCTCTGAGTCCTGGAGTGAGCACATCAGGGATTTCCAGCAGCCAAGGAGAGC AGAGTAATCCAGCTCAGTCTCCTTTCTCTCCTCATACCTCCCCTCACCTGCCTGGCATCCGA GGCCCTTCCCCGTCCCCTGTTGGCTCTCCCGCCAGTGTTGCTCAGTCTCGCTCAGGACCACT CTCGCCTGCTGCAGTGCCAGGCAACCAGATGCCACCTCGGCCACCCAGTGGCAGTTCGGACA GCATCATGCATCCTTCCATGAACCAATCAAGCATTGCCCAAGATCGAGGTTATATGCAGAGG AACTCCCAGATGCCCCAGTACAGTTCCCCCCAGCCCGGCTCAGCCTTATCTCCGCGTCAGCT TTCCGGAGGACAGATACACACAGGCATGGGCTCCTACCAGCAGAACTCCATGGGGAGCTATG GTCCCCAGGGGGGTCAGTATGGCCCACAAGGTGGCTACCCCAGGCAGCCAAACTATAATGCC TTGCCCAATGCCAACTACCCCAGTGCAGGCATGGCTGGAGGCATAAACCCCATGGGTGCCGG AGGTCAAATGCATGGACAGCCTGGCATCCCACCTTATGGCACACTCCCTCCAGGGAGGATGA GTCACGCCTCCATGGGCAACCGGCCTTATGGCCCTAACAATGGCCAATATGCCACCTCAGGT TGGGTCAGGGATGTGTCCCCACCAGGGGGCATGAACCGGAAAACCCAAGAAACTGCTGTCGC CATGCATGTTGCTGCCAACTCTATCCAAAACAGGCCGCCAGGCTACCCCAATATGAATCAAG GGGGCATGATGGGAACTGGACCTCCTTATGGACAAGGGATTAATAGTATGGCTGGCATGATC AACCCTCAGGGACCCCCATATTCCATGGGTGGAACCATGGCCAACAATTCTGCAGGGATGGC AGCCAGCCCAGAGATGATGGGCCTTGGGGATGTAAAGTTAACTCCAGCCACCAAAATGAACA ACAAGGCAGATGGGACACCCAAGACAGAATCCAAATCCAAGAAATCCAGTTCTTCTACTACA ACCAATGAGAAGATCACCAAGTTGTATGAGCTGGGTGGTGGGCCTGAGAGGAAGATGTGGGT GGACCGTTATCTGGCCTTCACTGAGGAGAAGGCCATGGGCATGACAAATCTGCCTGCTGTGG GTAGGAAACCTCTGGACCTCTATCGCCTCTATGTGTCTGTGAAGGAGATTGGTGGATTGACT CAGGTCAACAAGAACAAAAAATGGCGGGAACTTGCAACCAACCTCAATGTGGGCACATCAAG CAGTGCTGCCAGCTCCTTGAAAAAGCAGTATATCCAGTGTCTCTATGCCTTTGAATGCAAGA TTGAACGGGGAGAAGACCCTCCCCCAGACATCTTTGCAGCTGCTGATTCCAAGAAGTCCCAG CCCAAGATCCAGCCTCCCTCTCCTGCGGGATCAGGATCTATGCAGGGGCCCCAGACTCCCCA GTCAACCAGCAGTTCCATGGCAGAAGGAGGAGACTTAAAGCCACCAACTCCAGCATCCACAC CACACAGTCAGATCCCCCCATTGCCAGGCATGAGCAGGAGCAATTCAGTTGGGATCCAGGAT GCCTTTAATGATGGAAGTGACTCCACATTCCAGAAGCGGAATTCCATGACTCCAAACCCTGG GTATCAGCCCAGTATGAATACCTCTGACATGATGGGGCGCATGTCCTATGAGCCAAATAAGG ATCCTTATGGCAGCATGAGGAAAGCTCCAGGGAGTGATCCCTTCATGTCCTCAGGGCAGGGC CCCAACGGCGGGATGGGTGACCCCTACAGTCGTGCTGCCGGCCCTGGGCTAGGAAATGTGGC GATGGGACCACGACAGCACTATCCCTATGGAGGTCCTTATGACAGAGTGAGGACGGAGCCTG GAATAGGGCCTGAGGGAAACATGAGCACTGGGGCCCCACAGTCGAATCTCATGCCTTCCAAC CCAGACTCGGGGATGTATTCTCCTAGCCGCTACCCCCCGCAGCAGCAGCAGCAGCAGCAGCA ACGACATGATTCCTATGGCAATCAGTTCTCCACCCAAGGCACCCCTTCTGGCAGCCCCTTCC CCAGCCAGCAGACTACAATGTATCAACAGCAACAGCAGAATTACAAGCGGCCAATGGATGGC ACATATGGCCCTCCTGCCAAGCGGCACGAAGGGGAGATGTACAGCGTGCCATACAGCACTGG GCAGGGGCTGCCTCAGCAGCAGCAGTTGCCCCCAGCCCAGCCCCAGCCTGCCAGCCAGCCAC AAGCTGCCCAGCCTTCCCCTCAGCAAGATGTATACAACCAGTATGGCAATGCCTATCCTGCC ACTGCCACAGCTGCTACTGAGCGCCGACCAGCAGGCGGCCCCCAGAACCAATTTCCATTCCA GTTTGGCCGAGACCGTGTCTCTGCACCCCCTGGCACCAATGCCCAGCAAAACATGCCACCAC AAATGATGGGCGGCCCCATACAGGCATCAGCTGAGGTTGCTCAGCAAGGCACCATGTGGCAG GGGCGTAATGACATGACCTATAATTATGCCAACAGGCAGAGCACGGCTCTGCCCCCCAGGGC CCCGCCTATCATGGCGTGA (SEQ ID NO: 827). An exemplary ARID1A gene sequence is provided at ENSEMBL Accession No. ENSG00000117713 (SEQ ID NO: 834).

[0039] By “basic leucine zipper transcription factor, ATF-like (BATF) polypeptide” is meant a protein having at least about 85% amino acid sequence identity to GenBank Accession No. AAC50314.1, which is provided below, or a fragment thereof having immunomodulatory activity.

>AAC50314.1 B-ATF [Homo sapiens]
(SEQ ID NO: 828)
MPHSSDSSDSSFSRSPPPGKQDSSDDVRRVQRREKNRIAAQKSRQ
RQTQKADTLHLESEDLEKQNAALRKEIKQLTEELKYFTSVLNSHE
PLCSVLAASTPSPPEVVYSAHAFHQPHVSSPRFQP.

[0040] By “basic leucine zipper transcription factor, ATF-like (BATF) polynucleotide” is meant a polynucleotide encoding a BATF polypeptide, as well as the introns, exons, 3′ untranslated regions, 5′ untranslated regions, and regulatory sequences associated with its expression, or fragments thereof. In embodiments, a BATF polynucleotide is the genomic sequence, cDNA, mRNA, or gene associated with and/or required for BATF expression. An exemplary BATF nucleic acid sequence is provided below (GenBank Accession No. U15460.1:210-587).

>U15460.1:210-587 Human bZip Protein B-ATF mRNA, Complete Cds
ATGCCTCACAGCTCCGACAGCAGTGACTCCAGCTTCAGCCGCTCTCCTCCCCCTGGCAAACA GGACTCATCTGATGATGTGAGAAGAGTTCAGAGGAGGGAGAAAAATCGTATTGCCGCCCAGA AGAGCCGACAGAGGCAGACACAGAAGGCCGACACCCTGCACCTGGAGAGCGAAGACCTGGAG AAACAGAACGCGGCTCTACGCAAGGAGATCAAGCAGCTCACAGAGGAACTGAAGTACTTCAC GTCGGTGCTGAACAGCCACGAGCCCCTGTGCTCGGTGCTGGCCGCCAGCACGCCCTCGCCCC CCGAGGTGGTGTACAGCGCCCACGCATTCCACCAACCTCATGTCAGCTCCCCGCGCTTCCAG CCCTGA (SEQ ID NO: 829). An exemplary BATF gene sequence is provided at ENSEMBL Accession No. ENSG00000156127 (SEQ ID NO: 835).

[0041] By “beta-2 microglobulin (β2M; B2M) polypeptide” is meant a protein having at least about 85% amino acid sequence identity to UniProt Accession No. P61769, which is provided below, or a fragment thereof having immunomodulatory activity.

>sp|P61769|B2MG_HUMAN Beta-2-microglobulin
OS = Homo sapiens
OX = 9606 GN = B2M
PE = 1 SV = 1
(SEQ ID NO: 553)
MSRSVALAVLALLSLSGLEAIQRTPKIQVYSRHPAENGKSNFLNC
YVSGFHPSDIEVDLLKNGERIEKVEHSDLSFSKDWSFYLLYYTEF
TPTEKDEYACRVNHVTLSQPKIVKWDRDM.

[0042] By “beta-2-microglobulin (β2M; B2M) polynucleotide” is meant a nucleic acid molecule encoding an β2M polypeptide, as well as the introns, exons, 3′ untranslated regions, 5′ untranslated regions, and regulatory sequences associated with its expression, or fragments thereof. The beta-2-microglobulin gene encodes a serum protein associated with the major histocompatibility complex. β2M is involved in non-self-recognition by host CD8+ T cells. An exemplary β2M polynucleotide sequence is provided at GenBank Accession No. DQ217933.1, which is provided below.

>DQ217933.1 Homo sapiens Beta-2-Microglobin (β2M) Gene, Complete Cds
CATGTCATAAATGGTAAGTCCAAGAAAAATACAGGTATTCCCCCCCAAAGAAAACTGTAAAA TCGACTTTTTTCTATCTGTACTGTTTTTTATTGGTTTTTAAATTGGTTTTCCAAGTGAGTAA ATCAGAATCTATCTGTAATGGATTTTAAATTTAGTGTTTCTCTGTGATGTAGTAAACAAGAA ACTAGAGGCAAAAATAGCCCTGTCCCTTGCTAAACTTCTAAGGCACTTTTCTAGTACAACTC AACACTAACATTTCAGGCCTTTAGTGCCTTATATGAGTTTTTAAAAGGGGGAAAAGGGAGGG AGCAAGAGTGTCTTAACTCATACATTTAGGCATAACAATTATTCTCATATTTTAGTTATTGA GAGGGCTGGTAGAAAAACTAGGTAAATAATATTAATAATTATAGCGCTTATTAAACACTACA GAACACTTACTATGTACCAGGCATTGTGGGAGGCTCTCTCTTGTGCATTATCTCATTTCATT AGGTCCATGGAGAGTATTGCATTTTCTTAGTTTAGGCATGGCCTCCACAATAAAGATTATCA AAAGCCTAAAAATATGTAAAAGAAACCTAGAAGTTATTTGTTGTGCTCCTTGGGGAAGCTAG GCAAATCCTTTCAACTGAAAACCATGGTGACTTCCAAGATCTCTGCCCCTCCCCATCGCCAT GGTCCACTTCCTCTTCTCACTGTTCCTCTTAGAAAAGATCTGTGGACTCCACCACCACGAAA TGGCGGCACCTTATTTATGGTCACTTTAGAGGGTAGGTTTTCTTAATGGGTCTGCCTGTCAT GTTTAACGTCCTTGGCTGGGTCCAAGGCAGATGCAGTCCAAACTCTCACTAAAATTGCCGAG CCCTTTGTCTTCCAGTGTCTAAAATATTAATGTCAATGGAATCAGGCCAGAGTTTGAATTCT AGTCTCTTAGCCTTTGTTTCCCCTGTCCATAAAATGAATGGGGGTAATTCTTTCCTCCTACA GTTTATTTATATATTCACTAATTCATTCATTCATCCATCCATTCGTTCATTCGGTTTACTGA GTACCTACTATGTGCCAGCCCCTGTTCTAGGGTGGAAACTAAGAGAATGATGTACCTAGAGG GCGCTGGAAGCTCTAAAGCCCTAGCAGTTACTGCTTTTACTATTAGTGGTCGTTTTTTTCTC CCCCCCGCCCCCCGACAATCAACAGAACAAAGAAAATTACCTAAACAGCAAGGACATAGGG AGGAACTTCTTGGCACAGAACTTTCCAAACACTTTTTCCTGAAGGGATACAAGAAGCAAGAA AGGTACTCTTTCACTAGGACCTTCTCTGAGCTGTCCTCAGGATGCTTTTGGGACTATTTTTC TTACCCAGAGAATGGAGAAACCCTGCAGGGAATTCCCAAGCTGTAGTTATAAACAGAAGTTC TCCTTCTGCTAGGTAGCATTCAAAGATCTTAATCTTCTGGGTTTCCGTTTTCTCGAATGAAA AATGCAGGTCCGAGCAGTTAACTGGCTGGGGCACCATTAGCAAGTCACTTAGCATCTCTGGG GCCAGTCTGCAAAGCGAGGGGGCAGCCTTAATGTGCCTCCAGCCTGAAGTCCTAGAATGAGC GCCCGGTGTCCCAAGCTGGGGCGCGCACCCCAGATCGGAGGGCGCCGATGTACAGACAGCAA ACTCACCCAGTCTAGTGCATGCCTTCTTAAACATCACGAGACTCTAAGAAAAGGAAACTGAA AACGGGAAAGTCCCTCTCTCTAACCTGGCACTGCGTCGCTGGCTTGGAGACAGGTGACGGTC CCTGCGGGCCTTGTCCTGATTGGCTGGGCACGCGTTTAATATAAGTGGAGGCGTCGCGCTGG CGGGCATTCCTGAAGCTGACAGCATTCGGGCCGAGATGTCTCGCTCCGTGGCCTTAGCTGTG CTCGCGCTACTCTCTCTTTCTGGCCTGGAGGCTATCCAGCGTGAGTCTCTCCTACCCTCCCG CTCTGGTCCTTCCTCTCCCGCTCTGCACCCTCTGTGGCCCTCGCTGTGCTCTCTCGCTCCGT GACTTCCCTTCTCCAAGTTCTCCTTGGTGGCCCGCCGTGGGGCTAGTCCAGGGCTGGATCTC GGGGAAGCGGCGGGGTGGCCTGGGAGTGGGGAAGGGGGTGCGCACCCGGGACGCGCGCTACT TGCCCCTTTCGGCGGGGAGCAGGGGAGACCTTTGGCCTACGGCGACGGGAGGGTCGGGACAA AGTTTAGGGCGTCGATAAGCGTCAGAGCGCCGAGGTTGGGGGAGGGTTTCTCTTCCGCTCTT TCGCGGGGCCTCTGGCTCCCCCAGCGCAGCTGGAGTGGGGGACGGGTAGGCTCGTCCCAAAG GCGCGGCGCTGAGGTTTGTGAACGCGTGGAGGGGCGCTTGGGGTCTGGGGGAGGCGTCGCCC GGGTAAGCCTGTCTGCTGCGGCTCTGCTTCCCTTAGACTGGAGAGCTGTGGACTTCGTCTAG GCGCCCGCTAAGTTCGCATGTCCTAGCACCTCTGGGTCTATGTGGGGCCACACCGTGGGGAG GAAACAGCACGCGACGTTTGTAGAATGCTTGGCTGTGATACAAAGCGGTTTCGAATAATTAA CTTATTTGTTCCCATCACATGTCACTTTTAAAAAATTATAAGAACTACCCGTTATTGACATC TTTCTGTGTGCCAAGGACTTTATGTGCTTTGCGTCATTTAATTTTGAAAACAGTTATCTTCC GCCATAGATAACTACTATGGTTATCTTCTGCCTCTCACAGATGAAGAAACTAAGGCACCGAG ATTTTAAGAAACTTAATTACACAGGGGATAAATGGCAGCAATCGAGATTGAAGTCAAGCCTA ACCAGGGCTTTTGCGGGAGCGCATGCCTTTTGGCTGTAATTCGTGCATTTTTTTTTAAGAAA AACGCCTGCCTTCTGCGTGAGATTCTCCAGAGCAAACTGGGCGGCATGGGCCCTGTGGTCTT TTCGTACAGAGGGCTTCCTCTTTGGCTCTTTGCCTGGTTGTTTCCAAGATGTACTGTGCCTC TTACTTTCGGTTTTGAAAACATGAGGGGGTTGGGCGTGGTAGCTTACGCCTGTAATCCCAGC ACTTAGGGAGGCCGAGGCGGGAGGATGGCTTGAGGTCCGTAGTTGAGACCAGCCTGGCCAAC ATGGTGAAGCCTGGTCTCTACAAAAAATAATAACAAAAATTAGCCGGGTGTGGTGGCTCGTG CCTGTGGTCCCAGCTGCTCCGGTGGCTGAGGCGGGAGGATCTCTTGAGCTTAGGCTTTTGAG CTATCATGGCGCCAGTGCACTCCAGCGTGGGCAACAGAGCGAGACCCTGTCTCTCAAAAAAG AAAAAAAAAAAAAAAGAAAGAGAAAAGAAAAGAAAGAAAGAAGTGAAGGTTTGTCAGTCAGG GGAGCTGTAAAACCATTAATAAAGATAATCCAAGATGGTTACCAAGACTGTTGAGGACGCCA GAGATCTTGAGCACTTTCTAAGTACCTGGCAATACACTAAGCGCGCTCACCTTTTCCTCTGG CAAAACATGATCGAAAGCAGAATGTTTTGATCATGAGAAAATTGCATTTAATTTGAATACAA TTTATTTACAACATAAAGGATAATGTATATATCACCACCATTACTGGTATTTGCTGGTTATG TTAGATGTCATTTTAAAAAATAACAATCTGATATTTAAAAAAAAATCTTATTTTGAAAATTT CCAAAGTAATACATGCCATGCATAGACCATTTCTGGAAGATACCACAAGAAACATGTAATGA TGATTGCCTCTGAAGGTCTATTTTCCTCCTCTGACCTGTGTGTGGGTTTTGTTTTTGTTTTA CTGTGGGCATAAATTAATTTTTCAGTTAAGTTTTGGAAGCTTAAATAACTCTCCAAAAGTCA TAAAGCCAGTAACTGGTTGAGCCCAAATTCAAACCCAGCCTGTCTGATACTTGTCCTCTTCT TAGAAAAGATTACAGTGATGCTCTCACAAAATCTTGCCGCCTTCCCTCAAACAGAGAGTTCC AGGCAGGATGAATCTGTGCTCTGATCCCTGAGGCATTTAATATGTTCTTATTATTAGAAGCT CAGATGCAAAGAGCTCTCTTAGCTTTTAATGTTATGAAAAAAATCAGGTCTTCATTAGATTC CCCAATCCACCTCTTGATGGGGCTAGTAGCCTTTCCTTAATGATAGGGTGTTTCTAGAGAGA TATATCTGGTCAAGGTGGCCTGGTACTCCTCCTTCTCCCCACAGCCTCCCAGACAAGGAGGA GTAGCTGCCTTTTAGTGATCATGTACCCTGAATATAAGTGTATTTAAAAGAATTTTATACAC ATATATTTAGTGTCAATCTGTATATTTAGTAGCACTAACACTTCTCTTCATTTTCAATGAAA AATATAGAGTTTATAATATTTTCTTCCCACTTCCCCATGGATGGTCTAGTCATGCCTCTCAT TTTGGAAAGTACTGTTTCTGAAACATTAGGCAATATATTCCCAACCTGGCTAGTTTACAGCA ATCACCTGTGGATGCTAATTTAAAACGCAAATCCCACTGTCACATGCATTACTCCATTTGATC ATAATGGAAAGTATGTTCTGTCCCATTTGCCATAGTCCTCACCTATCCCTGTTGTATTTTAT CGGGTCCAACTCAACCATTTAAGGTATTTGCCAGCTCTTGTATGCATTTAGGTTTTGTTTCT TTGTTTTTTAGCTCATGAAATTAGGTACAAAGTCAGAGAGGGGTCTGGCATATAAAACCTCA GCAGAAATAAAGAGGTTTTGTTGTTTGGTAAGAACATACCTTGGGTTGGTTGGGCACGGTGG CTCGTGCCTGTAATCCCAACACTTTGGGAGGCCAAGGCAGGCTGATCACTTGAAGTTGGGAG TTCAAGACCAGCCTGGCCAACATGGTGAAATCCCGTCTCTACTGAAAATACAAAAATTAACC AGGCATGGTGGTGTGTGCCTGTAGTCCCAGGAATCACTTGAACCCAGGAGGCGGAGGTTGCA GTGAGCTGAGATCTCACCACTGCACACTGCACTCCAGCCTGGGCAATGGAATGAGATTCCAT CCCAAAAAATAAAAAATAAAAAAATAAAGAACATACCTTGGGTTGATCCACTTAGGAACCT CAGATAATAACATCTGCCACGTATAGAGCAATTGCTATGTCCCAGGCACTCTACTAGACACT TCATACAGTTTAGAAAATCAGATGGGTGTAGATCAAGGCAGGAGCAGGAACCAAAAAGAAAG GCATAAACATAAGAAAAAAAATGGAAGGGGTGGAAACAGAGTACAATAACATGAGTAATTTG ATGGGGGCTATTATGAACTGAGAAATGAACTTTGAAAAGTATCTTGGGGCCAAATCATGTAG ACTCTTGAGTGATGTGTTAAGGAATGCTATGAGTGCTGAGAGGGCATCAGAAGTCCTTGAGA GCCTCCAGAGAAAGGCTCTTAAAAATGCAGCGCAATCTCCAGTGACAGAAGATACTGCTAGA AATCTGCTAGAAAAAAAACAAAAAAGGCATGTATAGAGGAATTATGAGGGAAAGATACCAAG TCACGGTTTATTCTTCAAAATGGAGGTGGCTTGTTGGGAAGGTGGAAGCTCATTTGGCCAGA GTGGAAATGGAATTGGGAGAAATCGATGACCAAATGTAAACACTTGGTGCCTGATATAGCTT GACACCAAGTTAGCCCCAAGTGAAATACCCTGGCAATATTAATGTGTCTTTTCCCGATATTC CTCAGGTACTCCAAAGATTCAGGTTTACTCACGTCATCCAGCAGAGAATGGAAAGTCAAATT TCCTGAATTGCTATGTGTCTGGGTTTCATCCATCCGACATTGAAGTTGACTTACTGAAGAAT GGAGAGAGAATTGAAAAAGTGGAGCATTCAGACTTGTCTTTCAGCAAGGACTGGTCTTTCTA TCTCTTGTACTACACTGAATTCACCCCCACTGAAAAAGATGAGTATGCCTGCCGTGTGAACC ATGTGACTTTGTCACAGCCCAAGATAGTTAAGTGGGGTAAGTCTTACATTCTTTTGTAAGCT GCTGAAAGTTGTGTATGAGTAGTCATATCATAAAGCTGCTTTGATATAAAAAAGGTCTATGG CCATACTACCCTGAATGAGTCCCATCCCATCTGATATAAACAATCTGCATATTGGGATTGTC AGGGAATGTTCTTAAAGATCAGATTAGTGGCACCTGCTGAGATACTGATGCACAGCATGGTT TCTGAACCAGTAGTTTCCCTGCAGTTGAGCAGGGAGCAGCAGCAGCACTTGCACAAATACAT ATACACTCTTAACACTTCTTACCTACTGGCTTCCTCTAGCTTTTGTGGCAGCTTCAGGTATA TTTAGCACTGAACGAACATCTCAAGAAGGTATAGGCCTTTGTTTGTAAGTCCTGCTGTCCTA GCATCCTATAATCCTGGACTTCTCCAGTACTTTCTGGCTGGATTGGTATCTGAGGCTAGTAG GAAGGGCTTGTTCCTGCTGGGTAGCTCTAAACAATGTATTCATGGGTAGGAACAGCAGCCTA TTCTGCCAGCCTTATTTCTAACCATTTTAGACATTTGTTAGTACATGGTATTTTAAAAGTAA AACTTAATGTCTTCCTTTTTTTTCTCCACTGTCTTTTTCATAGATCGAGACATGTAAGCAGC ATCATGGAGGTAAGTTTTTGACCTTGAGAAAATGTTTTTGTTTCACTGTCCTGAGGACTATT TATAGACAGCTCTAACATGATAACCCTCACTATGTGGAGAACATTGACAGAGTAACATTTTA GCAGGGAAAGAAGAATCCTACAGGGTCATGTTCCCTTCTCCTGTGGAGTGGCATGAAGAAGG TGTATGGCCCCAGGTATGGCCATATTACTGACCCTCTACAGAGAGGGCAAAGGAACTGCCAG TATGGTATTGCAGGATAAAGGCAGGTGGTTACCCACATTACCTGCAAGGCTTTGATCTTTCT TCTGCCATTTCCACATTGGACATCTCTGCTGAGGAGAGAAAATGAACCACTCTTTTCCTTTG TATAATGTTGTTTTATTCTTCAGACAGAAGAGAGGAGTTATACAGCTCTGCAGACATCCCAT TCCTGTATGGGGACTGTGTTTGCCTCTTAGAGGTTCCCAGGCCACTAGAGGAGATAAAGGGA AACAGATTGTTATAACTTGATATAATGATACTATAATAGATGTAACTACAAGGAGCTCCAGA AGCAAGAGAGAGGGAGGAACTTGGACTTCTCTGCATCTTTAGTTGGAGTCCAAAGGCTTTTC AATGAAATTCTACTGCCCAGGGTACATTGATGCTGAAACCCCATTCAAATCTCCTGTTATAT TCTAGAACAGGGAATTGATTTGGGAGAGCATCAGGAAGGTGGATGATCTGCCCAGTCACACT GTTAGTAAATTGTAGAGCCAGGACCTGAACTCTAATATAGTCATGTGTTACTTAATGACGGG GACATGTTCTGAGAAATGCTTACACAAACCTAGGTGTTGTAGCCTACTACACGCATAGGCTA CATGGTATAGCCTATTGCTCCTAGACTACAAACCTGTACAGCCTGTTACTGTACTGAATACT GTGGGCAGTTGTAACACAATGGTAAGTATTTGTGTATCTAAACATAGAAGTTGCAGTAAAAA TATGCTATTTTAATCTTATGAGACCACTGTCATATATACAGTCCATCATTGACCAAAACATC ATATCAGCATTTTTTCTTCTAAGATTTTGGGAGCACCAAAGGGATACACTAACAGGATATAC TCTTTATAATGGGTTTGGAGAACTGTCTGCAGCTACTTCTTTTAAAAAGGTGATCTACACAG TAGAAATTAGACAAGTTTGGTAATGAGATCTGCAATCCAAATAAAATAAATTCATTGCTAAC CTTTTTCTTTTCTTTTCAGGTTTGAAGATGCCGCATTTGGATTGGATGAATTCCAAATTCTG CTTGCTTGCTTTTTAATATTGATATGCTTATACACTTACACTTTATGCACAAAATGTAGGGT TATAATAATGTTAACATGGACATGATCTTCTTTATAATTCTACTTTGAGTGCTGTCTCCATG TTTGATGTATCTGAGCAGGTTGCTCCACAGGTAGCTCTAGGAGGGCTGGCAACTTAGAGGTG GGGAGCAGAGAATTCTCTTATCCAACATCAACATCTTGGTCAGATTTGAACTCTTCAATCTC TTGCACTCAAAGCTTGTTAAGATAGTTAAGCGTGCATAAGTTAACTTCCAATTTACATACTC TGCTTAGAATTTGGGGGAAAATTTAGAAATATAATTGACAGGATTATTGGAAATTTGTTATA ATGAATGAAACATTTTGTCATATAAGATTCATATTTACTTCTTATACATTTGATAAAGTAAG GCATGGTTGTGGTTAATCTGGTTTATTTTTGTTCCACAAGTTAAATAAATCATAAAACTTGA TGTGTTATCTCTTATATCTCACTCCCACTATTACCCCTTTATTTTCAAACAGGGAAACAGTC TTCAAGTTCCACTTGGTAAAAAATGTGAACCCCTTGTATATAGAGTTTGGCTCACAGTGTAA AGGGCCTCAGTGATTCACATTTTCCAGATTAGGAATCTGATGCTCAAAGAAGTTAAATGGCA TAGTTGGGGTGACACAGCTGTCTAGTGGGAGGCCAGCCTTCTATATTTTAGCCAGCGTTCTT TCCTGCGGGCCAGGTCATGAGGAGTATGCAGACTCTAAGAGGGAGCAAAAGTATCTGAAGGA TTTAATATTTTAGCAAGGAATAGATATACAATCATCCCTTGGTCTCCCTGGGGGATTGGTTT CAGGACCCCTTCTTGGACACCAAATCTATGGATATTTAAGTCCCTTCTATAAAATGGTATAG TATTTGCATATAACCTATCCACATCCTCCTGTATACTTTAAATCATTTCTAGATTACTTGTA ATACCTAATACAATGTAAATGCTATGCAAATAGTTGTTATTGTTTAAGGAATAATGACAAGA AAAAAAAGTCTGTACATGCTCAGTAAAGACACAACCATCCCTTTTTTTCCCCAGTGTTTTTG ATCCATGGTTTGCTGAATCCACAGATGTGGAGCCCCTGGATACGGAAGGCCCGCTGTACTTT GAATGACAAATAACAGATTTAAA (SEQ ID NO: 554). An exemplary B2M gene sequence is provided at (SEQ ID NO: 555).

[0043] By “CBL proto-oncogene B (CBLB) polypeptide” is meant a protein having at least about 85% amino acid sequence identity to GenBank Accession No. AAB09291.1, which is provided below, or a fragment thereof having immunomodulatory activity.

>AAB09291.1 cbl-b [Homo sapiens]
(SEQ ID NO: 556)
[sequence omitted]

[0044] By “CBL proto-oncogene B (CBLB) polynucleotide” is meant a polynucleotide encoding a CBLB polypeptide, as well as the introns, exons, 3′ untranslated regions, 5′ untranslated regions, and regulatory sequences associated with its expression, or fragments thereof. In embodiments, a CBLB polynucleotide is the genomic sequence, cDNA, mRNA, or gene associated with and/or required for CBLB expression. An exemplary CBLB nucleic acid sequence is provided below (GenBank Accession No. U26710.1:323-3271).

>U26710.1:323-3271 Human Cbl-b mRNA, Complete Cds
ATGGCAAACTCAATGAATGGCAGAAACCCTGGTGGTCGAGGAGGAAATCCCCGAAAAGGTCG AATTTTGGGTATTATTGATGCTATTCAGGATGCAGTTGGACCCCCTAAGCAAGCTGCCGCAG ATCGCAGGACCGTGGAGAAGACTTGGAAGCTCATGGACAAAGTGGTAAGACTGTGCCAAAAT CCCAAACTTCAGTTGAAAAATAGCCCACCATATATACTTGATATTTTGCCTGATACATATCA GCATTTACGACTTATATTGAGTAAATATGATGACAACCAGAAACTTGCCCAACTCAGTGAGA ATGAGTACTTTAAAATCTACATTGATAGCCTTATGAAAAAGTCAAAACGGGCAATAAGACTC TTTAAAGAAGGCAAGGAGAGAATGTATGAAGAACAGTCACAGGACAGACGAAATCTCACAAA ACTGTCCCTTATCTTCAGTCACATGCTGGCAGAAATCAAAGCAATCTTTCCCAATGGTCAAT TCCAGGGAGATAACTTTCGTATCACAAAAGCAGATGCTGCTGAATTCTGGAGAAAGTTTTTT GGAGACAAAACTATCGTACCATGGAAAGTATTCAGACAGTGCCTTCATGAGGTCCACCAGAT TAGCTCTAGCCTGGAAGCAATGGCTCTAAAATCAACAATTGATTTAACTTGCAATGATTACA TTTCAGTTTTTGAATTTGATATTTTTACCAGGCTGTTTCAGCCTTGGGGCTCTATTTTGCGG AATTGGAATTTCTTAGCTGTGACACATCCAGGTTACATGGCATTTCTCACATATGATGAAGT TAAAGCACGACTACAGAAATATAGCACCAAACCCGGAAGCTATATTTTCCGGTTAAGTTGCA CTCGATTGGGACAGTGGGCCATTGGCTATGTGACTGGGGATGGGAATATCTTACAGACCATA CCTCATAACAAGCCCTTATTTCAAGCCCTGATTGATGGCAGCAGGGAAGGATTTTATCTTTA TCCTGATGGGAGGAGTTATAATCCTGATTTAACTGGATTATGTGAACCTACACCTCATGACC ATATAAAAGTTACACAGGAACAATATGAATTATATTGTGAAATGGGCTCCACTTTTCAGCTC TGTAAGATTTGTGCAGAGAATGACAAAGATGTCAAGATTGAGCCTTGTGGGCATTTGATGTG CACCTCTTGCCTTACGGCATGGCAGGAGTCGGATGGTCAGGGCTGCCCTTTCTGTCGTTGTG AAATAAAAGGAACTGAGCCCATAATCGTGGACCCCTTTGATCCAAGAGATGAAGGCTCCAGG TGTTGCAGCATCATTGACCCCTTTGGCATGCCGATGCTAGACTTGGACGACGATGATGATCG TGAGGAGTCCTTGATGATGAATCGGTTGGCAAACGTCCGAAAGTGCACTGACAGGCAGAACT CACCAGTCACATCACCAGGATCCTCTCCCCTTGCCCAGAGAAGAAAGCCACAGCCTGACCCA CTCCAGATCCCACATCTAAGCCTGCCACCCGTGCCTCCTCGCCTGGATCTAATTCAGAAAGG CATAGTTAGATCTCCCTGTGGCAGCCCAACAGGTTCACCAAAGTCTTCTCCTTGCATGGTGA GAAAACAAGATAAACCACTCCCAGCACCACCTCCTCCCTTAAGAGATCCTCCTCCACCGCCA CCTGAAAGACCTCCACCAATCCCACCAGACAATAGACTGAGTAGACACATCCATCATGTGGA AAGCGTGCCTTCCAGAGACCCGCCAATGCCTCTTGAAGCATGGTGCCCTCGGGATGTGTTTG GGACTAATCAGCTTGTGGGATGTCGACTCCTAGGGGAGGGCTCTCCAAAACCTGGAATCACA GCGAGTTCAAATGTCAATGGAAGGCACAGTAGAGTGGGCTCTGACCCAGTGCTTATGCGGAA ACACAGACGCCATGATTTGCCTTTAGAAGGAGCTAAGGTCTTTTCCAATGGTCACCTTGGAA GTGAAGAATATGATGTTCCTCCCCGGCTTTCTCCTCCTCCTCCAGTTACCACCCTCCTCCCT AGCATAAAGTGTACTGGTCCGTTAGCAAATTCTCTTTCAGAGAAAACAAGAGACCCAGTAGA GGAAGATGATGATGAATACAAGATTCCTTCATCCCACCCTGTTTCCCTGAATTCACAACCAT CTCATTGTCATAATGTAAAACCTCCTGTTCGGTCCTGTGATAATGGTCACTGTATGCTGAAT GGAACACATGGTCCATCTTCAGAGAAGAAATCAAACATCCCTGACTTAAGCATATATTTAAA GGGAGATGTTTTTGATTCAGCCTCTGATCCCGTGCCATTACCACCTGCCAGGCCTCCAACTC GGGACAATCCAAAGCATGGTTCTTCACTCAACAGGACGCCCTCTGATTATGATCTTCTCATC CCTCCATTAGGTGAAGATGCTTTTGATGCCCTCCCTCCATCTCTCCCACCTCCCCCACCTCC TGCAAGGCATAGTCTCATTGAACATTCAAAACCTCCTGGCTCCAGTAGCCGGCCATCCTCAG GACAGGATCTTTTTCTTCTTCCTTCAGATCCCTTTGTTGATCTAGCAAGTGGCCAAGTTCCT TTGCCTCCTGCTAGAAGGTTACCAGGTGAAAATGTCAAAACTAACAGAACATCACAGGACTA TGATCAGCTTCCTTCATGTTCAGATGGTTCACAGGCACCAGCCAGACCCCCTAAACCACGAC CGCGCAGGACTGCACCAGAAATTCACCACAGAAAACCCCATGGGCCTGAGGCGGCATTGGAA AATGTCGATGCAAAAATTGCAAAACTCATGGGAGAGGGTTATGCCTTTGAAGAGGTGAAGAG AGCCTTAGAGATAGCCCAGAATAATGTCGAAGTTGCCCGGAGCATCCTCCGAGAATTTGCCT TCCCTCCTCCAGTATCCCCACGTCTAAATCTATAG (SEQ ID NO: 557). An exemplary CBLB gene sequence is provided at ENSEMBL Accession No. ENSG00000114423 (SEQ ID NO: 558).

[0045] By “cluster of differentiation 3 epsilon (CD3e or CD3 epsilon) polypeptide” is meant a protein having at least about 85% amino acid sequence identity to NCBI Accession No. NP_000724.1 or a fragment thereof having immunomodulatory activity. An exemplary amino acid sequence is provided below.

>NP_000724.1 T-cell surface glycoprotein CD3
epsilon chain precursor [Homo sapiens]
(SEQ ID NO: 559)
MQSGTHWRVLGLCLLSVGVWGQDGNEEMGGITQTPYKVSISGTTV
ILTCPQYPGSEILWQHNDKNIGGDEDDKNIGSDEDHLSLKEFSEL
EQSGYYVCYPRGSKPEDANFYLYLRARVCENCMEMDVMSVATIVI
VDICITGGLLLLVYYWSKNRKAKAKPVTRGAGAGGRQRGQNKERP
PPVPNPDYEPIRKGQRDLYSGLNQRRI.

[0046] By “cluster of differentiation 3 epsilon (CD3e or CD3 epsilon) polynucleotide” is meant a polynucleotide encoding a CD3e polypeptide, as well as the introns, exons, 3′ untranslated regions, 5′ untranslated regions, and regulatory sequences associated with its expression, or fragments thereof. In embodiments, a CD3e polynucleotide is the genomic sequence, cDNA, mRNA, or gene associated with and/or required for CD3e expression. An exemplary CD3e nucleic acid sequence is provided below (NCBI Ref. Seq. Accession No. NM_000733.4).

>NM_000733.4 Homo sapiens CD3e Molecule (CD3E), mRNA
AGAAACCCTCCTCCCCTCCCAGCCTCAGGTGCCTGCTTCAGAAAATGAAGTAGTAAGTCTGC TGGCCTCCGCCATCTTAGTAAAGTAACAGTCCCATGAAACAAAGATGCAGTCGGGCACTCAC TGGAGAGTTCTGGGCCTCTGCCTCTTATCAGTTGGCGTTTGGGGGCAAGATGGTAATGAAGA AATGGGTGGTATTACACAGACACCATATAAAGTCTCCATCTCTGGAACCACAGTAATATTGA CATGCCCTCAGTATCCTGGATCTGAAATACTATGGCAACACAATGATAAAAACATAGGCGGT GATGAGGATGATAAAAACATAGGCAGTGATGAGGATCACCTGTCACTGAAGGAATTTTCAGA ATTGGAGCAAAGTGGTTATTATGTCTGCTACCCCAGAGGAAGCAAACCAGAAGATGCGAACT TTTATCTCTACCTGAGGGCAAGAGTGTGTGAGAACTGCATGGAGATGGATGTGATGTCGGTG GCCACAATTGTCATAGTGGACATCTGCATCACTGGGGGCTTGCTGCTGCTGGTTTACTACTG GAGCAAGAATAGAAAGGCCAAGGCCAAGCCTGTGACACGAGGAGCGGGTGCTGGCGGCAGGC AAAGGGGACAAAACAAGGAGAGGCCACCACCTGTTCCCAACCCAGACTATGAGCCCATCCGG AAAGGCCAGCGGGACCTGTATTCTGGCCTGAATCAGAGACGCATCTGACCCTCTGGAGAACA CTGCCTCCCGCTGGCCCAGGTCTCCTCTCCAGTCCCCCTGCGACTCCCTGTTTCCTGGGCTA GTCTTGGACCCCACGAGAGAGAATCGTTCCTCAGCCTCATGGTGAACTCGCGCCCTCCAGCC TGATCCCCCGCTCCCTCCTCCCTGCCTTCTCTGCTGGTACCCAGTCCTAAAATATTGCTGCT TCCTCTTCCTTTGAAGCATCATCAGTAGTCACACCCTCACAGCTGGCCTGCCCTCTTGCCAG GATATTTATTTGTGCTATTCACTCCCTTCCCTTTGGATGTAACTTCTCCGTTCAGTTCCCTC CTTTTCTTGCATGTAAGTTGTCCCCCATCCCAAAGTATTCCATCTACTTTTCTATCGCCGTC CCCTTTTGCAGCCCTCTCTGGGGATGGACTGGGTAAAATGTTGACAGAGGCCCTGCCCCGTTC ACAGATCCTGGCCCTGAGCCAGCCCTGTGCTCCTCCCTCCCCCAACACTCCCTACCAACCCC CTAATCCCCTACTCCCTCCACCCCCCCTCCACTGTAGGCCACTGGATGGTCATTTGCATCTC CGTAAATGTGCTCTGCTCCTCAGCTGAGAGAGAAAAAAATAAACTGTATTTGGCTGCAA (SEQ ID NO: 560). An exemplary CD3e sequence is provided at ENSEMBL Accession No. ENSG00000198851 (SEQ ID NO: 561).

[0047] By “cluster of differentiation 3 gamma (CD3g or CD3 gamma) polypeptide” is meant a protein having at least about 85% amino acid sequence identity to NCBI Accession No. NP_000064.1 or a fragment thereof and having immunomodulatory activity. An exemplary amino acid sequence is provided below.

>NP_000064.1 T-cell surface glycoprotein CD3
gamma chain precursor [Homo sapiens]
(SEQ ID NO: 562)
MEQGKGLAVLILAIILLQGTLAQSIKGNHLVKVYDYQEDGSVLLT
CDAEAKNITWFKDGKMIGFLTEDKKKWNLGSNAKDPRGMYQCKGS
QNKSKPLQVYYRMCQNCIELNAATISGFLFAEIVSIFVLAVGVYF
IAGQDGVRQSRASDKQTLLPNDQLYQPLKDREDDQYSHLQGNQLR
RN.

[0048] By “cluster of differentiation 3 gamma (CD3g or CD3 gamma) polynucleotide” is meant a polypeptide encoding a CD3g polypeptide, as well as the introns, exons, 3′ untranslated regions, 5′ untranslated regions, and regulatory sequences associated with its expression, or fragments thereof. In embodiments, a CD3g polynucleotide is the genomic sequence, cDNA, mRNA, or gene associated with and/or required for CD3g expression. An exemplary CD3g nucleic acid sequence is provided below (NCBI Ref. Seq. Accession No. NM_000073.3).

>NM_000073.3 Homo sapiens CD3g Molecule (CD3G), mRNA
AGTCTAGCTGCTGCACAGGCTGGCTGGCTGGCTGGCTGCTAAGGGCTGCTCCACGCTTTTGC CGGAGGACAGAGACTGACATGGAACAGGGGAAGGGCCTGGCTGTCCTCATCCTGGCTATCAT TCTTCTTCAAGGTACTTTGGCCCAGTCAATCAAAGGAAACCACTTGGTTAAGGTGTATGACT ATCAAGAAGATGGTTCGGTACTTCTGACTTGTGATGCAGAAGCCAAAAATATCACATGGTTT AAAGATGGGAAGATGATCGGCTTCCTAACTGAAGATAAAAAAAAATGGAATCTGGGAAGTAA TGCCAAGGACCCTCGAGGGATGTATCAGTGTAAAGGATCACAGAACAAGTCAAAACCACTCC AAGTGTATTACAGAATGTGTCAGAACTGCATTGAACTAAATGCAGCCACCATATCTGGCTTT CTCTTTGCTGAAATCGTCAGCATTTTCGTCCTTGCTGTTGGGGTCTACTTCATTGCTGGACA GGATGGAGTTCGCCAGTCGAGAGCTTCAGACAAGCAGACTCTGTTGCCCAATGACCAGCTCT ACCAGCCCCTCAAGGATCGAGAAGATGACCAGTACAGCCACCTTCAAGGAAACCAGTTGAGG AGGAATTGAACTCAGGACTCAGAGTAGTCCAGGTGTTCTCCTCCTATTCAGTTCCCAGAATC AAAGCAATGCATTTTGGAAAGCTCCTAGCAGAGAGACTTTCAGCCCTAAATCTAGACTCAAG GTTCCCAGAGATGACAAATGGAGAAGAAAGGCCATCAGAGCAAATTTGGGGGTTTCTCAAAT AAAATAAAAATAAAAACAAATACTGTGTTTCAGAAGCGCCACCTATTGGGGAAAATTGTAAA AGAAAAATGAAAAGATCAAATAACCCCCTGGATTTGAATATAATTTTTTGTGTTGTAATTTT TATTTCGTTTTTGTATAGGTTATAATTCACATGGCTCAAATATTCAGTGAAAGCTCTCCCTC CACCGCCATCCCCTGCTACCCAGTGACCCTGTTGCCCTCTTCAGAGACAAATTAGTTTCTCT TTTTTTTTTTTTTTTTTTTTTTTTTGAGACAGTCTGGCTCTGTCACCCAGGCTGAAATGCAG TGGCACCATCTCGGCTCACTGCAACCTCTGCCTCCTGGGTTCAAGCGATTCTCCTGCCTCAG CCTCCCGGGCAGCTGGGATTACAGGCACACACTACCACACCTGGCTAATTTTTGTATTTTTA GTAGAGACAGGGTTTTGCTCTGTTGGCCAAGCTGGTCTCGAACTCCTGACCTCAAGTGATCC GCCCGCCTCAGCCTCCCAAAGTGCTGGGATTACAGGTGTGAGCCACCATGCCTGGTCTTAAA ACCAGTTTCTTATATATCTCTCTGGAGGTATTCTAGGCATATATGAGCACATTCTCAAGTAC ATATTATCCTCCCTTCCCCTATCTTTTAGACAAATGATATCAAACTATACATCTTGTGAGAT TATTGCATACCATTATATGAAGATACCATTATATCCTTTTTAATGCAACCATATTGTACAAA TAGACTATGATTTATTTAACCTGTTATCTATCAGTGGATATTTAAGTTGGTAGTTGGTTCCA ATCTTTTGCTCTTACAACAATTCTGCAATGACTAACATTGTATAAATATCATTTTTAAAAAT AATTGCATTGAAGCATAATGTACATGCCATAAAATCCACCCATCTTAAGTGATTTCACCTGT TCTCAGAAATTTTTAGTAAATTTAACTAATTGTACAGCCATTACCATAATCCAGCTTTAGGA CATTTTCTTTTTTTTCTTTTCTTTTCTTTTTTTTCTTTTTTTTTTTTTTTTGAAGTGGAATC TTGCTCTGTGGCCCAGGCTGGAGTGCAGTGGCGCGATCTCAGCTCACTGCAACCTCCACCTC CTGGGTTCAAGCGATTCTCTTGCCTTGGCCTCCCGAGTAGCTGAGACTACAGGCACATGCCA CCACGCCCAGCTCATTTTTTGTGTATTTAGTATTTGTGTATCTAGTATTTGTGTACTTAGTA GAGACAGGGTTTCACCATGTTGGCCAGGCTGGTCTCCAATTCCTGACCTCAGGCGATCCACC CGCCTTGACCTCCCAAAGTGCTGGGATTACAGGTGTGAGCCACCGCGCCAGGCCCGTAACTG TATTTTAATATAGCCATTCTATGGATTTAATATGGTATTTTATTATGGCCTTAATTTGCATT TCCCTAGATACTAACCATGCTGAGTGTCCTGTCTTGTGTTTATTAACCATTCATATATTTTT AGTGAAATGTGTATCAAATCTTTTGCCCATTTTTAAGTTGACTTATTTGTTTGTCTTCTTAC TATTGGGTTGCATATGTTTTTGATATAAGTCCTTTATCAGATATATGATTTGGAAATATTTT CTACCAATCTGTGGTTTGTTTTTCTTAATGGTGTCTTTTGAAGTGCAAAAGGTTTGAATTTT GAAGTACATTTTATTGATTTTTTCTTCTATATATTGTGCTTTTGGTATCATGTCTAATAAAT CTTTACCAAACCCACAGTTACAAAGATTTTCTCCTGTCTTCTTTTTATACTTTTTACAGCTT TATGGTTTTAGCTCTAACAATAAATGTGATTTTGAACATACATAAGACTATTTGTAACAAAC ACAAATAAATTGAATTGTTGGGCA (SEQ ID NO: 563). An exemplary CD3g sequence is provided at ENSEMBL Accession No. ENSG00000160654 (SEQ ID NO: 564).

[0049] By “cluster of differentiation 5 (CD5) polypeptide” is meant a protein having at least about 85% amino acid sequence identity to NCBI Accession No. NP_001333385.1, which is provided below, or a fragment thereof having immunomodulatory activity.

>NP_001333385.1 T-cell surface glycoprotein
CD5 isoform 2 [Homo sapiens]
(SEQ ID NO: 565)
MVCSQSWGRSSKQWEDPSQASKVCQRLNCGVPLSLGPFLVTYTPQ
SSIICYGQLGSFSNCSHSRNDMCHSLGLTCLEPQKTTPPTTRPPP
TTTPEPTAPPRLQLVAQSGGQHCAGVVEFYSGSLGGTISYEAQDK
TQDLENFLCNNLQCGSFLKHLPETEAGRAQDPGEPREHQPLPIQW
KIQNSSCTSLEHCFRKIKPQKSGRVLALLCSGFQPKVQSRLVGGS
SICEGTVEVRQGAQWAALCDSSSARSSLRWEEVCREQQCGSVNSY
RVLDAGDPTSRGLFCPHQKLSQCHELWERNSYCKKVFVTCQDPNP
AGLAAGTVASIILALVLLVVLLVVCGPLAYKKLVKKFRQKKQRQW
IGPTGMNQNMSFHRNHTATVRSHAENPTASHVDNEYSQPPRNSHL
SAYPALEGALHRSSMQPDNSSDSDYDLHGAQRL

[0050] By “cluster of differentiation 5 (CD5) polynucleotide” is meant a polynucleotide encoding a CD5 polypeptide, as well as the introns, exons, 3′ untranslated regions, 5′ untranslated regions, and regulatory sequences associated with its expression, or fragments thereof. In embodiments, a CD5 polynucleotide is the genomic sequence, cDNA, mRNA, or gene associated with and/or required for CD5 expression. An exemplary CD5 nucleic acid sequence is provided below (NCBI Ref. Seq. Accession No. NM_001346456.1).

>NM_001346456.1 Homo sapiens CD5 Molecule (CD5), Transcript Variant 2, mRNA
GAGTCTTGCTGATGCTCCCGGCTGAATAAACCCCTTCCTTCTTTAACTTGGTGTCTGAGGGG TTTTGTCTGTGGCTTGTCCTGCTACATTTCTTGGTTCCCTGACCAGGAAGCAAAGTGATTAA CGGACAGTTGAGGCAGCCCCTTAGGCAGCTTAGGCCTGCCTTGTGGAGCATCCCCGCGGGGA ACTCTGGCCAGCTTGAGCGACACGGATCCTCAGAGCGCTCCCAGGTAGGCAATTGCCCCAGT GGAATGCCTCGTCAGAGCAGTGCATGGCAGGCCCCTGTGGAGGATCAACGCAGTGGCTGAAC ACAGGGAAGGAACTGGCACTTGGAGTCCGGACAACTGAAACTTGTCGCTTCCTGCCTCGGAC GGCTCAGCTGGTATGACCCAGATTTCCAGGCAAGGCTCACCCGTTCCAACTCGAAGTGCCAG GGCCAGCTGGAGGTCTACCTCAAGGACGGATGGCACATGGTTTGCAGCCAGAGCTGGGGCCG GAGCTCCAAGCAGTGGGAGGACCCCAGTCAAGCGTCAAAAGTCTGCCAGCGGCTGAACTGTG GGGTGCCCTTAAGCCTTGGCCCCTTCCTTGTCACCTACACACCTCAGAGCTCAATCATCTGC TACGGACAACTGGGCTCCTTCTCCAACTGCAGCCACAGCAGAAATGACATGTGTCACTCTCT GGGCCTGACCTGCTTAGAACCCCAGAAGACAACACCTCCAACGACAAGGCCCCCGCCCACCA CAACTCCAGAGCCCACAGCTCCTCCCAGGCTGCAGCTGGTGGCACAGTCTGGCGGCCAGCAC TGTGCCGGCGTGGTGGAGTTCTACAGCGGCAGCCTGGGGGGTACCATCAGCTATGAGGCCCA GGACAAGACCCAGGACCTGGAGAACTTCCTCTGCAACAACCTCCAGTGTGGCTCCTTCTTGA AGCATCTGCCAGAGACTGAGGCAGGCAGAGCCCAAGACCCAGGGGAGCCACGGGAACACCAG CCCTTGCCAATCCAATGGAAGATCCAGAACTCAAGCTGTACCTCCCTGGAGCATTGCTTCAG GAAAATCAAGCCCCAGAAAAGTGGCCGAGTTCTTGCCCTCCTTTGCTCAGGTTTCCAGCCCA AGGTGCAGAGCCGTCTGGTGGGGGGCAGCAGCATCTGTGAAGGCACCGTGGAGGTGCGCCAG GGGGCTCAGTGGGCAGCCCTGTGTGACAGCTCTTCAGCCAGGAGCTCGCTGCGGTGGGAGGA GGTGTGCCGGGAGCAGCAGTGTGGCAGCGTCAACTCCTATCGAGTGCTGGACGCTGGTGACC CAACATCCCGGGGGCTCTTCTGTCCCCATCAGAAGCTGTCCCAGTGCCACGAACTTTGGGAG AGAAATTCCTACTGCAAGAAGGTGTTTGTCACATGCCAGGATCCAAACCCCGCAGGCCTGGC CGCAGGCACGGTGGCAAGCATCATCCTGGCCCTGGTGCTCCTGGTGGTGCTGCTGGTCGTGT GCGGCCCCCTTGCCTACAAGAAGCTAGTGAAGAAATTCCGCCAGAAGAAGCAGCGCCAGTGG ATTGGCCCAACGGGAATGAACCAAAACATGTCTTTCCATCGCAACCACACGGCAACCGTCCG ATCCCATGCTGAGAACCCCACAGCCTCCCACGTGGATAACGAATACAGCCAACCTCCCAGGA ACTCCCACCTGTCAGCTTATCCAGCTCTGGAAGGGGCTCTGCATCGCTCCTCCATGCAGCCT GACAACTCCTCCGACAGTGACTATGATCTGCATGGGGCTCAGAGGCTGTAAAGAACTGGGAT CCATGAGCAAAAAGCCGAGAGCCAGACCTGTTTGTCCTGAGAAAACTGTCCGCTCTTCACTT GAAATCATGTCCCTATTTCTACCCCGGCCAGAACATGGACAGAGGCCAGAAGCCTTCCGGAC AGGCGCTGCTGCCCCGAGTGGCAGGCCAGCTCACACTCTGCTGCACAACAGCTCGGCCGCCC CTCCACTTGTGGAAGCTGTGGTGGGCAGAGCCCCAAAACAAGCAGCCTTCCAACTAGAGACT CGGGGGTGTCTGAAGGGGGCCCCCTTTCCCTGCCCGCTGGGGAGCGGCGTCTCAGTGAAATC GGCTTTCTCCTCAGACTCTGTCCCTGGTAAGGAGTGACAAGGAAGCTCACAGCTGGGCGAGT GCATTTTGAATAGTTTTTTGTAAGTAGTGCTTTTCCTCCTTCCTGACAAATCGAGCGCTTTG GCCTCTTCTGTGCAGCATCCACCCCTGCGGATCCCTCTGGGGAGGACAGGAAGGGGACTCCC GGAGACCTCTGCAGCCGTGGTGGTCAGAGGCTGCTCACCTGAGCACAAAGACAGCTCTGCAC ATTCACCGCAGCTGCCAGCCAGGGGTCTGGGTGGGCACCACCCTGACCCACAGCGTCACCCC ACTCCCTCTGTCTTATGACTCCCCTCCCCAACCCCCTCATCTAAAGACACCTTCCTTTCCAC TGGCTGTCAAGCCCACAGGGCACCAGTGCCACCCAGGGCCCGGCACAAAGGGGCGCCTAGTA AACCTTAACCAACTTGGTTTTTTGCTTCACCCAGCAATTAAAAGTCCCAAGCTGAGGTAGTT TCAGTCCATCACAGTTCATCTTCTAACCCAAGAGTCAGAGATGGGGCTGGTCATGTTCCTTT GGTTTGAATAACTCCCTTGACGAAAACAGACTCCTCTAGTACTTGGAGATCTTGGACGTACA CCTAATCCCATGGGGCCTCGGCTTCCTTAACTGCAAGTGAGAAGAGGAGGTCTACCCAGGAG CCTCGGGTCTGATCAAGGGAGAGGCCAGGCGCAGCTCACTGCGGCGGCTCCCTAAGAAGGTG AAGCAACATGGGAACACATCCTAAGACAGGTCCTTTCTCCACGCCATTTGATGCTGTATCTC CTGGGAGCACAGGCATCAATGGTCCAAGCCGCATAATAAGTCTGGAAGAGCAAAAGGGAGTT ACTAGGATATGGGGTGGGCTGCTCCCAGAATCTGCTCAGCTTTCTGCCCCCACCAACACCCT CCAACCAGGCCTTGCCTTCTGAGAGCCCCCGTGGCCAAGCCCAGGTCACAGATCTTCCCCCG ACCATGCTGGGAATCCAGAAACAGGGACCCCATTTGTCTTCCCATATCTGGTGGAGGTGAGG GGGCTCCTCAAAAGGGAACTGAGAGGCTGCTCTTAGGGAGGGCAAAGGTTCGGGGGCAGCCA GTGTCTCCCATCAGTGCCTTTTTTAATAAAAGCTCTTTCATCTATAGTTTGGCCACCATACA GTGGCCTCAAAGCAACCATGGCCTACTTAAAAACCAAACCAAAAATAAAGAGTTTAGTTGAG GAGAAAAAAAAAAAAAAAAAAAAAAAAA (SEQ ID NO: 566). An exemplary CD5 gene sequence is provided at ENSEMBL Accession No. ENSG00000110448 (SEQ ID NO: 567).

[0051] By “B-lymphocyte antigen CD19 (CD19) polypeptide” is meant a protein having at least about 85% amino acid sequence identity to GenBank Accession No.: AAB60697.1, which is provided below, or a fragment thereof having immunomodulatory activity.

>AAB60697.1 CD19 [Homo sapiens]
(SEQ ID NO: 568)
[sequence omitted]

[0052] By “B-lymphocyte antigen CD19 (CD19) polynucleotide” is meant a polynucleotide encoding a CD19 polypeptide, as well as the introns, exons, 3′ untranslated regions, 5′ untranslated regions, and regulatory sequences associated with its expression, or fragments thereof. In embodiments, a CD19 polynucleotide is the genomic sequence, cDNA, mRNA, or gene associated with and/or required for CD19 expression. An exemplary CD19 nucleic acid sequence is provided below (GenBank Accession No. AH005421.2:331-421,665-931,1230-1433,1554-1829,2057-2167,2769-2817,3128-3216,3591-3704,3896-4000,4174-4242,4343-4399,4488-4544,4813-4905,5231-5322).

>AH005421.2:331-421,665-931,1230-1433,1554-1829,2057-2167,2769-2817,3128-3216,3591-3704,3896-4000,4174-4242,4343-4399,4488-4544,4813-4905,5231-5322 Homo sapiens CD19 (CD19) Gene, Complete Cds
ATGCCACCTCCTCGCCTCCTCTTCTTCCTCCTCTTCCTCACCCCCATGGAAGTCAGGCCCGA GGAACCTCTAGTGGTGAAGGTGGAAGGTGAGGGAGATAACGCTGTGCTGCAGTGCCTCAAGG GGACCTCAGATGGCCCCACTCAGCAGCTGACCTGGTCTCGGGAGTCCCCGCTTAAACCCTTC TTAAAACTCAGCCTGGGGCTGCCAGGCCTGGGAATCCACATGAGGCCCCTGGCATCCTGGCT TTTCATCTTCAACGTCTCTCAACAGATGGGGGGCTTCTACCTGTGCCAGCCGGGGCCCCCCT CTGAGAAGGCCTGGCAGCCTGGCTGGACAGTCAATGTGGAGGGCAGCGGGGAGCTGTTCCGG TGGAATGTTTCGGACCTAGGTGGCCTGGGCTGTGGCCTGAAGAACAGGTCCTCAGAGGGCCC CAGCTCCCCTTCCGGGAAGCTCATGAGCCCCAAGCTGTATGTGTGGGCCAAAGACCGCCCTG AGATCTGGGAGGGAGAGCCTCCGTGTGTCCCACCGAGGGACAGCCTGAACCAGAGCCTCAGC CAGGACCTCACCATGGCCCCTGGCTCCACACTCTGGCTGTCCTGTGGGGTACCCCCTGACTC TGTGTCCAGGGGCCCCCTCTCCTGGACCCATGTGCACCCCAAGGGGCCTAAGTCATTGCTGA GCCTAGAGCTGAAGGACGATCGCCCGGCCAGAGATATGTGGGTAATGGAGACGGGTCTGTTG TTGCCCCGGGCCACAGCTCAAGACGCTGGAAAGTATTATTGTCACCGTGGCAACCTGACCAT GTCATTCCACCTGGAGATCACTGCTCGGCCAGTACTATGGCACTGGCTGCTGAGGACTGGTG GCTGGAAGGTCTCAGCTGTGACTTTGGCTTATCTGATCTTCTGCCTGTGTTCCCTTGTGGGC ATTCTTCATCTTCAAAGAGCCCTGGTCCTGAGGAGGAAAAGAAAGCGAATGACTGACCCCAC CAGGAGATTCTTCAAAGTGACGCCTCCCCCAGGAAGCGGGCCCCAGAACCAGTACGGGAACG TGCTGTCTCTCCCCACACCCACCTCAGGCCTCGGACGCGCCCAGCGTTGGGCCGCAGGCCTG GGGGGCACTGCCCCGTCTTATGGAAACCCGAGCAGCGACGTCCAGGCGGATGGAGCCTTGGG GTCCCGGAGCCCGCCGGGAGTGGGCCCAGAAGAAGAGGAAGGGGAGGGCTATGAGGAACCTG ACAGTGAGGAGGACTCCGAGTTCTATGAGAACGACTCCAACCTTGGGCAGGACCAGCTCTCC CAGGATGGCAGCGGCTACGAGAACCCTGAGGATGAGCCCCTGGGTCCTGAGGATGAAGACTC CTTCTCCAACGCTGAGTCTTATGAGAACGAGGATGAAGAGCTGACCCAGCCGGTCGCCAGGA CAATGGACTTCCTGAGCCCTCATGGGTCAGCCTGGGACCCCAGCCGGGAAGCAACCTCCCTG GGGTCCCAGTCCTATGAGGATATGAGAGGAATCCTGTATGCAGCCCCCCAGCTCCGCTCCAT TCGGGGCCAGCCTGGACCCAATCATGAGGAAGATGCAGACTCTTATGAGAACATGGATAATC CCGATGGGCCAGACCCAGCCTGGGGAGGAGGGGGCCGCATGGGCACCTGGAGCACCAGGTGA (SEQ ID NO: 569). An exemplary CD19 gene sequence is provided at ENSEMBL Accession No. ENSG00000177455 (SEQ ID NO: 570).

[0053] By “C/EBP Homologous Protein (CHOP) polypeptide” is meant a protein having at least about 85% amino acid sequence identity to GenBank Accession No. AAH03637.1, which is provided below, or a fragment thereof having immunomodulatory activity.

>AAH03637.1 DNA-damage-inducible transcript 3
[Homo sapiens]
(SEQ ID NO: 571)
MAAESLPFSFGTLSSWELEAWYEDLQEVLSSDENGGTYVSPPGNE
EEESKIFTTLDPASLAWLTEEEPEPAEVTSTSQSPHSPDSSQSSL
AQEEEEEDQGRTRKRKQSGHSPARAGKQRMKEKEQENERKVAQLA
EENERLKQEIERLTREVEATRRALIDRMVNLHQA.

[0054] By “C/EBP Homologous Protein (CHOP) polynucleotide” is meant a polynucleotide encoding a CHOP polypeptide, as well as the introns, exons, 3′ untranslated regions, 5′ untranslated regions, and regulatory sequences associated with its expression, or fragments thereof. In embodiments, a CHOP polynucleotide is the genomic sequence, cDNA, mRNA, or gene associated with and/or required for CHOP expression. An exemplary CHOP nucleic acid sequence is provided below (GenBank Accession No. BC003637.2:182-691).

>BC003637.2:182-691 Homo sapiens DNA-Damage-Inducible Transcript 3, mRNA (cDNA Clone MGC:4154 IMAGE:3530545), Complete Cds
ATGGCAGCTGAGTCATTGCCTTTCTCCTTTGGGACACTGTCCAGCTGGGAGCTGGAAGCCTG GTATGAGGACCTGCAAGAGGTCCTGTCTTCAGATGAAAATGGGGGTACCTATGTTTCACCTC CTGGAAATGAAGAGGAAGAATCAAAAATCTTCACCACTCTTGACCCTGCTTCTCTGGCTTGG CTGACTGAGGAGGAGCCAGAACCAGCAGAGGTCACAAGCACCTCCCAGAGCCCTCACTCTCC AGATTCCAGTCAGAGCTCCCTGGCTCAGGAGGAAGAGGAGGAAGACCAAGGGAGAACCAGGA AACGGAAACAGAGTGGTCATTCCCCAGCCCGGGCTGGAAAGCAGCGCATGAAGGAGAAAGAA CAGGAGAATGAAAGGAAAGTGGCACAGCTAGCTGAAGAGAATGAACGGCTCAAGCAGGAAAT CGAGCGCCTGACCAGGGAAGTAGAGGCGACTCGCCGAGCTCTGATTGACCGAATGGTGAATC TGCACCAAGCATGA (SEQ ID NO: 572). An exemplary CHOP gene sequence is provided at ENSEMBL Accession No. ENSG00000175197 (SEQ ID NO: 573).

[0055] By “class II, major histocompatibility complex, transactivator (CIITA) polypeptide” is meant a protein having at least about 85% amino acid sequence identity to NCBI Accession No. NP_001273331.1, which is provided below, or a fragment thereof having DNA binding activity.

>NP_001273331.1 MHC class II transactivator
isoform 1 [Homo sapiens]
(SEQ ID NO: 574)
MRCLAPRPAGSYLSEPQGSSQCATMELGPLEGGYLELLNSDADPL
CLYHFYDQMDLAGEEEIELYSEPDTDTINCDQFSRLLCDMEGDEE
TREAYANIAELDQYVFQDSQLEGLSKDIFIEHIGPDEVIGESMEM
PAEVGQKSQKRPFPEELPADLKHWKPAEPPTVVTGSLLVGPVSDC
STLPCLPLPALFNQEPASGQMRLEKTDQIPMPFSSSSLSCLNLPE
GPIQFVPTISTLPHGLWQISEAGTGVSSIFIYHGEVPQASQVPPP
SGFTVHGLPTSPDRPGSTSPFAPSATDLPSMPEPALTSRANMTEH
KTSPTQCPAAGEVSNKLPKWPEPVEQFYRSLQDTYGAEPAGPDGI
LVEVDLVQARLERSSSKSLERELATPDWAERQLAQGGLAEVLLAA
KEHRRPRETRVIAVLGKAGQGKSYWAGAVSRAWACGRLPQYDFVF
SVPCHCLNRPGDAYGLQDLLFSLGPQPLVAADEVFSHILKRPDRV
LLILDGFEELEAQDGFLHSTCGPAPAEPCSLRGLLAGLFQKKLLR
GCTLLLTARPRGRLVQSLSKADALFELSGFSMEQAQAYVMRYFES
SGMTEHQDRALTLLRDRPLLLSHSHSPTLCRAVCQLSEALLELGE
DAKLPSTLTGLYVGLLGRAALDSPPGALAELAKLAWELGRRHQST
LQEDQFPSADVRTWAMAKGLVQHPPRAAESELAFPSFLLQCFLGA
LWLALSGEIKDKELPQYLALTPRKKRPYDNWLEGVPRFLAGLIFQ
PPARCLGALLGPSAAASVDRKQKVLARYLKRLQPGTLRARQLLEL
LHCAHEAEEAGIWQHVVQELPGRLSFLGTRLTPPDAHVLGKALEA
AGQDFSLDLRSTGICPSGLGSLVGLSCVTRFRAALSDTVALWESL
QQHGETKLLQAAEEKFTIEPFKAKSLKDVEDLGKLVQTQRTRSSS
EDTAGELPAVRDLKKLEFALGPVSGPQAFPKLVRILTAFSSLQHL
DLDALSENKIGDEGVSQLSATFPQLKSLETLNLSQNNITDLGAYK
LAEALPSLAASLLRLSLYNNCICDVGAESLARVLPDMVSLRVMDV
QYNKFTAAGAQQLAASLRRCPHVETLAMWTPTIPFSVQEHLQQQD
SRISLR.

[0056] By “class II, major histocompatibility complex, transactivator (CIITA) polynucleotide” is meant a nucleic acid molecule encoding an CIITA polypeptide, as well as the introns, exons, 3′ untranslated regions, 5′ untranslated regions, and regulatory sequences associated with its expression, or fragments thereof. An exemplary CIITA polynucleotide is provided at NCBI Accession No. NM_001286402.1, which is provide below.

>NM_001286402.1 Homo sapiens Class II Major Histocompatibility Complex Transactivator (CIITA), Transcript Variant 1, mRNA
GGTTAGTGATGAGGCTAGTGATGAGGCTGTGTGCTTCTGAGCTGGGCATCCGAAGGCATCCT TGGGGAAGCTGAGGGCACGAGGAGGGGCTGCCAGACTCCGGGAGCTGCTGCCTGGCTGGGAT TCCTACACAATGCGTTGCCTGGCTCCACGCCCTGCTGGGTCCTACCTGTCAGAGCCCCAAGG CAGCTCACAGTGTGCCACCATGGAGTTGGGGCCCCTAGAAGGTGGCTACCTGGAGCTTCTTA ACAGCGATGCTGACCCCCTGTGCCTCTACCACTTCTATGACCAGATGGACCTGGCTGGAGAA GAAGAGATTGAGCTCTACTCAGAACCCGACACAGACACCATCAACTGCGACCAGTTCAGCAG GCTGTTGTGTGACATGGAAGGTGATGAAGAGACCAGGGAGGCTTATGCCAATATCGCGGAAC TGGACCAGTATGTCTTCCAGGACTCCCAGCTGGAGGGCCTGAGCAAGGACATTTTCATAGAG CACATAGGACCAGATGAAGTGATCGGTGAGAGTATGGAGATGCCAGCAGAAGTTGGGCAGAA AAGTCAGAAAAGACCCTTCCCAGAGGAGCTTCCGGCAGACCTGAAGCACTGGAAGCCAGCTG AGCCCCCCACTGTGGTGACTGGCAGTCTCCTAGTGGGACCAGTGAGCGACTGCTCCACCCTG CCCTGCCTGCCACTGCCTGCGCTGTTCAACCAGGAGCCAGCCTCCGGCCAGATGCGCCTGGA GAAAACCGACCAGATTCCCATGCCTTTCTCCAGTTCCTCGTTGAGCTGCCTGAATCTCCCTG AGGGACCCATCCAGTTTGTCCCCACCATCTCCACTCTGCCCCATGGGCTCTGGCAAATCTCT GAGGCTGGAACAGGGGTCTCCAGTATATTCATCTACCATGGTGAGGTGCCCCAGGCCAGCCA AGTACCCCCTCCCAGTGGATTCACTGTCCACGGCCTCCCAACATCTCCAGACCGGCCAGGCT CCACCAGCCCCTTCGCTCCATCAGCCACTGACCTGCCCAGCATGCCTGAACCTGCCCTGACC TCCCGAGCAAACATGACAGAGCACAAGACGTCCCCCACCCAATGCCCGGCAGCTGGAGAGGT CTCCAACAAGCTTCCAAAATGGCCTGAGCCGGTGGAGCAGTTCTACCGCTCACTGCAGGACA CGTATGGTGCCGAGCCCGCAGGCCCGGATGGCATCCTAGTGGAGGTGGATCTGGTGCAGGCC AGGCTGGAGAGGAGCAGCAGCAAGAGCCTGGAGCGGGAACTGGCCACCCCGGACTGGGCAGA ACGGCAGCTGGCCCAAGGAGGCCTGGCTGAGGTGCTGTTGGCTGCCAAGGAGCACCGGCGGC CGCGTGAGACACGAGTGATTGCTGTGCTGGGCAAAGCTGGTCAGGGCAAGAGCTATTGGGCT GGGGCAGTGAGCCGGGCCTGGGCTTGTGGCCGGCTTCCCCAGTACGACTTTGTCTTCTCTGT CCCCTGCCATTGCTTGAACCGTCCGGGGGATGCCTATGGCCTGCAGGATCTGCTCTTCTCCC TGGGCCCACAGCCACTCGTGGCGGCCGATGAGGTTTTCAGCCACATCTTGAAGAGACCTGAC CGCGTTCTGCTCATCCTAGACGGCTTCGAGGAGCTGGAAGCGCAAGATGGCTTCCTGCACAG CACGTGCGGACCGGCACCGGCGGAGCCCTGCTCCCTCCGGGGGCTGCTGGCCGGCCTTTTCC AGAAGAAGCTGCTCCGAGGTTGCACCCTCCTCCTCACAGCCCGGCCCCGGGGCCGCCTGGTC CAGAGCCTGAGCAAGGCCGACGCCCTATTTGAGCTGTCCGGCTTCTCCATGGAGCAGGCCCA GGCATACGTGATGCGCTACTTTGAGAGCTCAGGGATGACAGAGCACCAAGACAGAGCCCTGA CGCTCCTCCGGGACCGGCCACTTCTTCTCAGTCACAGCCACAGCCCTACTTTGTGCCGGGCA GTGTGCCAGCTCTCAGAGGCCCTGCTGGAGCTTGGGGAGGACGCCAAGCTGCCCTCCACGCT CACGGGACTCTATGTCGGCCTGCTGGGCCGTGCAGCCCTCGACAGCCCCCCCGGGGCCCTGG CAGAGCTGGCCAAGCTGGCCTGGGAGCTGGGCCGCAGACATCAAAGTACCCTACAGGAGGAC CAGTTCCCATCCGCAGACGTGAGGACCTGGGCGATGGCCAAAGGCTTAGTCCAACACCCACC GCGGGCCGCAGAGTCCGAGCTGGCCTTCCCCAGCTTCCTCCTGCAATGCTTCCTGGGGGCCC TGTGGCTGGCTCTGAGTGGCGAAATCAAGGACAAGGAGCTCCCGCAGTACCTAGCATTGACC CCAAGGAAGAAGAGGCCCTATGACAACTGGCTGGAGGGCGTGCCACGCTTTCTGGCTGGGCT GATCTTCCAGCCTCCCGCCCGCTGCCTGGGAGCCCTACTCGGGCCATCGGCGGCTGCCTCGG TGGACAGGAAGCAGAAGGTGCTTGCGAGGTACCTGAAGCGGCTGCAGCCGGGGACACTGCGG GCGCGGCAGCTGCTGGAGCTGCTGCACTGCGCCCACGAGGCCGAGGAGGCTGGAATTTGGCA GCACGTGGTACAGGAGCTCCCCGGCCGCCTCTCTTTTCTGGGCACCCGCCTCACGCCTCCTG ATGCACATGTACTGGGCAAGGCCTTGGAGGCGGCGGGCCAAGACTTCTCCCTGGACCTCCGC AGCACTGGCATTTGCCCCTCTGGATTGGGGAGCCTCGTGGGACTCAGCTGTGTCACCCGTTT CAGGGCTGCCTTGAGCGACACGGTGGCGCTGTGGGAGTCCCTGCAGCAGCATGGGGAGACCA AGCTACTTCAGGCAGCAGAGGAGAAGTTCACCATCGAGCCTTTCAAAGCCAAGTCCCTGAAG GATGTGGAAGACCTGGGAAAGCTTGTGCAGACTCAGAGGACGAGAAGTTCCTCGGAAGACAC AGCTGGGGAGCTCCCTGCTGTTCGGGACCTAAAGAAACTGGAGTTTGCGCTGGGCCCTGTCT CAGGCCCCCAGGCTTTCCCCAAACTGGTGCGGATCCTCACGGCCTTTTCCTCCCTGCAGCAT CTGGACCTGGATGCGCTGAGTGAGAACAAGATCGGGGACGAGGGTGTCTCGCAGCTCTCAGC CACCTTCCCCCAGCTGAAGTCCTTGGAAACCCTCAATCTGTCCCAGAACAACATCACTGACC TGGGTGCCTACAAACTCGCCGAGGCCCTGCCTTCGCTCGCTGCATCCCTGCTCAGGCTAAGC TTGTACAATAACTGCATCTGCGACGTGGGAGCCGAGAGCTTGGCTCGTGTGCTTCCGGACAT GGTGTCCCTCCGGGTGATGGACGTCCAGTACAACAAGTTCACGGCTGCCGGGGCCCAGCAGC TCGCTGCCAGCCTTCGGAGGTGTCCTCATGTGGAGACGCTGGCGATGTGGACGCCCACCATC CCATTCAGTGTCCAGGAACACCTGCAACAACAGGATTCACGGATCAGCCTGAGATGATCCCA GCTGTGCTCTGGACAGGCATGTTCTCTGAGGACACTAACCACGCTGGACCTTGAACTGGGTA CTTGTGGACACAGCTCTTCTCCAGGCTGTATCCCATGAGCCTCAGCATCCTGGCACCCGGCC CCTGCTGGTTCAGGGTTGGCCCCTGCCCGGCTGCGGAATGAACCACATCTTGCTCTGCTGAC AGACACAGGCCCGGCTCCAGGCTCCTTTAGCGCCCAGTTGGGTGGATGCCTGGTGGCAGCTG CGGTCCACCCAGGAGCCCCGAGGCCTTCTCTGAAGGACATTGCGGACAGCCACGGCCAGGCC AGAGGGAGTGACAGAGGCAGCCCCATTCTGCCTGCCCAGGCCCCTGCCACCCTGGGGAGAAA GTACTTCTTTTTTTTTATTTTTAGACAGAGTCTCACTGTTGCCCAGGCTGGCGTGCAGTGGT GCGATCTGGGTTCACTGCAACCTCCGCCTCTTGGGTTCAAGCGATTCTTCTGCTTCAGCCTC CCGAGTAGCTGGGACTACAGGCACCCACCATCATGTCTGGCTAATTTTTCATTTTTAGTAGA GACAGGGTTTTGCCATGTTGGCCAGGCTGGTCTCAAACTCTTGACCTCAGGTGATCCACCCA CCTCAGCCTCCCAAAGTGCTGGGATTACAAGCGTGAGCCACTGCACCGGGCCACAGAGAAAG TACTTCTCCACCCTGCTCTCCGACCAGACACCTTGACAGGGCACACCGGGCACTCAGAAGAC ACTGATGGGCAACCCCCAGCCTGCTAATTCCCCAGATTGCAACAGGCTGGGCTTCAGTGGCA GCTGCTTTTGTCTATGGGACTCAATGCACTGACATTGTTGGCCAAAGCCAAAGCTAGGCCTG GCCAGATGCACCAGCCCTTAGCAGGGAAACAGCTAATGGGACACTAATGGGGCGGTGAGAGG GGAACAGACTGGAAGCACAGCTTCATTTCCTGTGTCTTTTTTCACTACATTATAAATGTCTC TTTAATGTCACAGGCAGGTCCAGGGTTTGAGTTCATACCCTGTTACCATTTTGGGGTACCCA CTGCTCTGGTTATCTAATATGTAACAAGCCACCCCAAATCATAGTGGCTTAAAACAACACTC ACATTTA (SEQ ID NO: 575). An exemplary CIITA gene sequence is provided at (SEQ ID NO: 576).

[0057] By “Cytokine-inducible SH2-containing protein (CISH) polypeptide” is meant a protein having at least about 85% amino acid sequence identity to GenBank Accession No. AAD28471.2, which is provided below, or a fragment thereof having immunomodulatory activity.

>AAD28471.2 cytokine-inducible SH2-containing
protein [Homo sapiens]
(SEQ ID NO: 577)
MDTPLPRPRPLLAVERTGQRPLWAPSLELPKPVMQPLPAGAFLEE
VAEGTPAQTESEPKVLDPEEDLLCIAKTFSYLRESGWYWGSITAS
EARQHLQKMPEGTFLVRDSTHPSYLFTLSVKTTRGPTNVRIEYAD
SSFRLDSNCLSRPRILAFPDVVSLVQHYVASCTADTRSDSPDPAP
TPALPMPKEDAPSDPALPAPPPATAVHLKLVQPFVRRSSARSLQH
LCRLVINRLVADVDCLPLPRRMADYLRQYPFQL.

[0058] By “Cytokine-inducible SH2-containing protein (CISH) polynucleotide” is meant a polynucleotide encoding a CISH polypeptide, as well as the introns, exons, 3′ untranslated regions, 5′ untranslated regions, and regulatory sequences associated with its expression, or fragments thereof. In embodiments, a CISH polynucleotide is the genomic sequence, cDNA, mRNA, or gene associated with and/or required for CISH expression. An exemplary CISH nucleic acid sequence is provided below (GenBank Accession No. AF132297.2:280-1056).

>AF132297.2:280-1056 Homo sapiens Cytokine-Inducible SH2-Containing Protein (G18) mRNA, Complete Cds
ATGGACACACCCCTGCCCAGACCTCGTCCTTTGCTGGCTGTGGAGCGGACTGGGCAGCGGCC CCTGTGGGCCCCGTCCCTGGAACTGCCCAAGCCAGTCATGCAGCCCTTGCCTGCTGGGGCCT TCCTCGAGGAGGTGGCAGAGGGTACCCCAGCCCAGACAGAGAGTGAGCCAAAGGTGCTGGAC CCAGAGGAGGATCTGCTGTGCATAGCCAAGACCTTCTCCTACCTTCGGGAATCTGGCTGGTA TTGGGGTTCCATTACGGCCAGCGAGGCCCGACAACACCTGCAGAAGATGCCAGAAGGCACGT TCTTAGTACGTGACAGCACGCACCCCAGCTACCTGTTCACGCTGTCAGTGAAAACCACTCGT GGCCCCACCAATGTACGCATTGAGTATGCCGACTCCAGCTTCCGTCTGGACTCCAACTGCTT GTCCAGGCCACGCATCCTGGCCTTTCCGGATGTGGTCAGCCTTGTGCAGCACTATGTGGCCT CCTGCACTGCTGATACCCGAAGCGACAGCCCCGATCCTGCTCCCACCCCGGCCCTGCCTATG CCTAAGGAGGATGCGCCTAGTGACCCAGCACTGCCTGCTCCTCCACCAGCCACTGCTGTACA CCTAAAACTGGTGCAGCCCTTTGTACGCAGAAGCAGTGCCCGCAGCCTGCAACACCTGTGCC GCCTTGTCATCAACCGTCTGGTGGCCGACGTGGACTGCCTGCCACTGCCCCGGCGCATGGCC GACTACCTCCGACAGTACCCCTTCCAGCTCTGA (SEQ ID NO: 578). An exemplary CISH gene sequence is provided at ENSEMBL Accession No. ENSG00000114737 (SEQ ID NO: 579).

[0059] By “Deoxycytidine kinase (DCK) polypeptide” is meant a protein having at least about 85% amino acid sequence identity to GenBank Accession No. AAA35752.1, which is provided below, or a fragment thereof having immunomodulatory activity.

>AAA35752.1 deoxycytidine kinase [Homo sapiens]
(SEQ ID NO: 580)
[sequence omitted]

[0060] By “Deoxycytidine kinase (DCK) polynucleotide” is meant a polynucleotide encoding a DCK polypeptide, as well as the introns, exons, 3′ untranslated regions, 5′ untranslated regions, and regulatory sequences associated with its expression, or fragments thereof. In embodiments, a DCK polynucleotide is the genomic sequence, cDNA, mRNA, or gene associated with and/or required for DCK expression. An exemplary DCK nucleic acid sequence is provided below (GenBank Accession No. M60527.1:160-942).

>M60527.1:160-942 Human Deoxycytidine Kinase mRNA, Complete Cds
ATGGCCACCCCGCCCAAGAGAAGCTGCCCGTCTTTCTCAGCCAGCTCTGAGGGGACCCGCAT CAAGAAAATCTCCATCGAAGGGAACATCGCTGCAGGGAAGTCAACATTTGTGAATATCCTTA AACAATTGTGTGAAGATTGGGAAGTGGTTCCTGAACCTGTTGCCAGATGGTGCAATGTTCAA AGTACTCAAGATGAATTTGAGGAACTTACAATGTCTCAGAAAAATGGTGGGAATGTTCTTCA GATGATGTATGAGAAACCTGAACGATGGTCTTTTACCTTCCAAACATATGCCTGTCTCAGTC GAATAAGAGCTCAGCTTGCCTCTCTGAATGGCAAGCTCAAAGATGCAGAGAAACCTGTATTA TTTTTTGAACGATCTGTGTATAGTGACAGGTATATTTTTGCATCTAATTTGTATGAATCTGA ATGCATGAATGAGACAGAGTGGACAATTTATCAAGACTGGCATGACTGGATGAATAACCAAT TTGGCCAAAGCCTTGAATTGGATGGAATCATTTATCTTCAAGCCACTCCAGAGACATGCTTA CATAGAATATATTTACGGGGAAGAAATGAAGAGCAAGGCATTCCTCTTGAATATTTAGAGAA GCTTCATTATAAACATGAAAGCTGGCTCCTGCATAGGACACTGAAAACCAACTTCGATTATC TTCAAGAGGTGCCTATCTTAACACTGGATGTTAATGAAGACTTTAAAGACAAATATGAAAGT CTGGTTGAAAAGGTCAAAGAGTTTTTGAGTACTTTGTGA (SEQ ID NO: 581). An exemplary DCK gene sequence is provided at ENSEMBL Accession No. ENSG00000156136 (SEQ ID NO: 582).

[0061] By “Diacylglycerol kinase alpha/zeta (DGKα; DGKa) polypeptide” is meant a protein having at least about 85% amino acid sequence identity to GenBank Accession No. AAC34805.1, which is provided below, or fragments thereof having immunomodulatory activity.

>AAC34805.1 diacylglycerol kinase
alpha [Homo sapiens]
(SEQ ID NO: 583)
[sequence omitted]

[0062] By “Diacylglycerol kinase alpha/zeta (DGKα; DGKa) polynucleotide” is meant a polynucleotide encoding a DGKα polypeptide, as well as the introns, exons, 3′ untranslated regions, 5′ untranslated regions, and regulatory sequences associated with its expression, or fragments thereof. In embodiments, a DGKα polynucleotide is the genomic sequence, cDNA, mRNA, or gene associated with and/or required for DGKα/ζ expression. An exemplary DGKα nucleic acid sequences is provided below (GenBank Accession No. AF064770.1:240-599).

>AF064770.1:240-599 Homo sapiens Clone 17 Diacylglycerol Kinase Alpha (DAGK1) mRNA, Complete Cds
ATGGCCAAGGAGAGGGGCCTAATAAGCCCCAGTGATTTTGCCCAGCTGCAAAAATACATGGA ATACTCCACCAAAAAGGTCAGTGATGTCCTAAAGCTCTTCGAGGATGGCGAGATGGCTAAAT ATGTCCAAGGAGATGCCATTGGGTACGAGGGATTCCAGCAATTCCTGGAAATCTATCTCGAA GTGGATAATGTTCCCAGACACCTAAGCCTGGCACTGTTTCAATCCTTTGAGACTGGTCACTG CTTAAATGAGACAAATGTGACAAAAGGTATGGTCAAGCAGATGTGGTGTGTCTCAATGATGT TTCCTGCTACTTTTCCCTTCTGGAGGGTGGTCGGCCAGAAGACAAGTTAG (SEQ ID NO: 584). An exemplary DGK alpha gene sequence is provided at ENSEMBL Accession No. ENSG00000065357 (SEQ ID NO: 585).

[0063] By “Diacylglycerol kinase alpha/zeta (DGKζ; DGKz) polypeptide” is meant a protein having at least about 85% amino acid sequence identity to GenBank Accession No. AAC50478.1 which is provided below, or fragments thereof having immunomodulatory activity.

>AAC50478.1 diacylglycerol kinase
zeta [Homo sapiens]
(SEQ ID NO: 586)
MEPRDGSPEARSSDSESASASSSGSERDAGPEPDKAPRRLNKRRF
PGLRLFGHRKAITKSGLQHLAPPPPTPGAPCSESERQIRSTVDWS
ESATYGEHIWFETNVSGDFCYVGEQYCVARMLKSVSRRKCAACKI
VVHTPCIEQLEKINFRCKPSFRESGSRNVREPTFVRHHWVHRRRQ
DGKCRHCGKGFQQKFTFHSKEIVAISCSWCKQAYHSKVSCFMLQQ
IEEPCSLGVHAAVVIPPTWILRARRPQNTLKASKKKKRASFKRKS
SKKGPEEGRWRPFIIRPTPSPLMKPLLVFVNPKSGGNQGAKIIQS
FLWYLNPRQVFDLSQGGPKEALEMYRKVHNLRILACGGDGTVGWI
LSTLDQLRLKPPPPVAILPLGTGNDLARTLNWGGGYTDEPVSKIL
SHVEEGNVVQLDRWDLHAEPNPEAGPEDRDEGATDRLPLDVFNNY
FSLGFDAHVTLEFHESREANPEKFNSRFRNKMFYAGTAFSDFLMG
SSKDLAKHIRVVCDGMDLTPKIQDLKPQCVVFLNIPRYCAGTMPW
GHPGEHHDFEPQRHDDGYLEVIGFTMTSLAALQVGGHGERLTQCR
EVVLTTSKAIPVQVDGEPCKLAASRIRIALRNQATMVQKAKRRSA
APLHSDQQPVPEQLRIQVSRVSMHDYEALHYDKEQLKEASVPLGT
VVVPGDSDLELCRAHIERLQQEPDGAGAKSPTCQKLSPKWCFLDA
TTASRFYRIDRAQEHLNYVTEIAQDEIYILDPELLGASARPDLPT
PTSPLPTSPCSPTPRSLQGDAAPPQGEELIEAAKRNDFCKLQELH
RAGGDLMHRDEQSRTLLHHAVSTGSKDVVRYLLDHAPPEILDAVE
ENGETCLHQAAALGQRTICHYIVEAGASLMKTDQQGDTPRQRAEK
AQDTELAAYLENRQHYQMIQREDQETAV.

[0064] By “Diacylglycerol kinase alpha/zeta (DGKζ; DGKz) polynucleotide” is meant a polynucleotide encoding a DGKζ polypeptide, as well as the introns, exons, 3′ untranslated regions, 5′ untranslated regions, and regulatory sequences associated with its expression, or fragments thereof. In embodiments, a DGK polynucleotide is the genomic sequence, cDNA, mRNA, or gene associated with and/or required for DGKζ expression. An exemplary DGK nucleic acid sequence is provided below (GenBank Accession No. U51477.1:89-2875).

>U51477.1:89-2875 Human Diacylglycerol Kinase Zeta mRNA, Complete Cds
ATGGAGCCGCGGGACGGTAGCCCCGAGGCCCGGAGCAGCGACTCCGAGTCGGCTTCCGCCTC GTCCAGCGGCTCCGAGCGCGACGCCGGTCCCGAGCCGGACAAGGCGCCGCGGCGACTCAACA AGCGGCGCTTCCCGGGGCTGCGGCTCTTCGGGCACAGGAAAGCCATCACCAAGTCGGGCCTC CAGCACCTGGCCCCCCCTCCGCCCACCCCTGGGGCCCCGTGCAGCGAGTCAGAGCGGCAGAT CCGGAGTACAGTGGACTGGAGCGAGTCAGCGACATATGGGGAGCACATCTGGTTCGAGACCA ACGTGTCCGGGGACTTCTGCTACGTTGGGGAGCAGTACTGTGTAGCCAGGATGCTGAAGTCA GTGTCTCGAAGAAAGTGCGCAGCCTGCAAGATTGTGGTGCACACGCCCTGCATCGAGCAGCT GGAGAAGATAAATTTCCGCTGTAAGCCGTCCTTCCGTGAATCAGGCTCCAGGAATGTCCGCG AGCCAACCTTTGTACGGCACCACTGGGTACACAGACGACGCCAGGACGGCAAGTGTCGGCAC TGTGGGAAGGGATTCCAGCAGAAGTTCACCTTCCACAGCAAGGAGATTGTGGCCATCAGCTG CTCGTGGTGCAAGCAGGCATACCACAGCAAGGTGTCCTGCTTCATGCTGCAGCAGATCGAGG AGCCGTGCTCGCTGGGGGTCCACGCAGCCGTGGTCATCCCGCCCACCTGGATCCTCCGCGCC CGGAGGCCCCAGAATACTCTGAAAGCAAGCAAGAAGAAGAAGAGGGCATCCTTCAAGAGGAA GTCCAGCAAGAAAGGGCCTGAGGAGGGCCGCTGGAGACCCTTCATCATCAGGCCCACCCCCT CCCCGCTCATGAAGCCCCTGCTGGTGTTTGTGAACCCCAAGAGTGGGGGCAACCAGGGTGCA AAGATCATCCAGTCTTTCCTCTGGTATCTCAATCCCCGACAAGTCTTCGACCTGAGCCAGGG AGGGCCCAAGGAGGCGCTGGAGATGTACCGCAAAGTGCACAACCTGCGGATCCTGGCGTGCG GGGGCGACGGCACGGTGGGCTGGATCCTCTCCACCCTGGACCAGCTACGCCTGAAGCCGCCA CCCCCTGTTGCCATCCTGCCCCTGGGTACTGGCAACGACTTGGCCCGAACCCTCAACTGGGG TGGGGGCTACACAGATGAGCCTGTGTCCAAGATCCTCTCCCACGTGGAGGAGGGGAACGTGG TACAGCTGGACCGCTGGGACCTCCACGCTGAGCCCAACCCCGAGGCAGGGCCTGAGGACCGA GATGAAGGCGCCACCGACCGGTTGCCCCTGGATGTCTTCAACAACTACTTCAGCCTGGGCTT TGACGCCCACGTCACCCTGGAGTTCCACGAGTCTCGAGAGGCCAACCCAGAGAAATTCAACA GCCGCTTTCGGAATAAGATGTTCTACGCCGGGACAGCTTTCTCTGACTTCCTGATGGGCAGC TCCAAGGACCTGGCCAAGCACATCCGAGTGGTGTGTGATGGAATGGACTTGACTCCCAAGAT CCAGGACCTGAAACCCCAGTGTGTTGTTTTCCTGAACATCCCCAGGTACTGTGCGGGCACCA TGCCCTGGGGCCACCCTGGGGAGCACCACGACTTTGAGCCCCAGCGGCATGACGACGGCTAC CTCGAGGTCATTGGCTTCACCATGACGTCGTTGGCCGCGCTGCAGGTGGGCGGACACGGCGA GCGGCTGACGCAGTGTCGCGAGGTGGTGCTCACCACATCCAAGGCCATCCCGGTGCAGGTGG ATGGCGAGCCCTGCAAGCTTGCAGCCTCACGCATCCGCATCGCCCTGCGCAACCAGGCCACC ATGGTGCAGAAGGCCAAGCGGCGGAGCGCCGCCCCCCTGCACAGCGACCAGCAGCCGGTGCC AGAGCAGTTGCGCATCCAGGTGAGTCGCGTCAGCATGCACGACTATGAGGCCCTGCACTACG ACAAGGAGCAGCTCAAGGAGGCCTCTGTGCCGCTGGGCACTGTGGTGGTCCCAGGAGACAGT GACCTAGAGCTCTGCCGTGCCCACATTGAGAGACTCCAGCAGGAGCCCGATGGTGCTGGAGC CAAGTCCCCGACATGCCAGAAACTGTCCCCCAAGTGGTGCTTCCTGGACGCCACCACTGCCA GCCGCTTCTACAGGATCGACCGAGCCCAGGAGCACCTCAACTATGTGACTGAGATCGCACAG GATGAGATTTATATCCTGGACCCTGAGCTGCTGGGGGCATCGGCCCGGCCTGACCTCCCAAC CCCCACTTCCCCTCTCCCCACCTCACCCTGCTCACCCACGCCCCGGTCACTGCAAGGGGATG CTGCACCCCCTCAAGGTGAAGAGCTGATTGAGGCTGCCAAGAGGAACGACTTCTGTAAGCTC CAGGAGCTGCACCGAGCTGGGGGCGACCTCATGCACCGAGACGAGCAGAGTCGCACGCTCCT GCACCACGCAGTCAGCACTGGCAGCAAGGATGTGGTCCGCTACCTGCTGGACCACGCCCCCC CAGAGATCCTTGATGCGGTGGAGGAAAACGGGGAGACCTGTTTGCACCAAGCAGCGGCCCTG GGCCAGCGCACCATCTGCCACTACATCGTGGAGGCCGGGGCCTCGCTCATGAAGACAGACCA GCAGGGCGACACTCCCCGGCAGCGGGCTGAGAAGGCTCAGGACACCGAGCTGGCCGCCTACC TGGAGAACCGGCAGCACTACCAGATGATCCAGCGGGAGGACCAGGAGACGGCTGTGTAG (SEQ ID NO: 587). An exemplary DGK zeta gene sequence is provided at ENSEMBL Accession No. ENSG00000149091 (SEQ ID NO: 588).

[0065] By “DEAH-box helicase 37 (DHX37) polypeptide” is meant a protein having at least about 85% amino acid sequence identity to GenBank Accession No. AAH37964.1, which is provided below, or a fragment thereof having immunomodulatory activity.

>AAH37964.1 DEAH (Asp-Glu-Ala-His) box
polypeptide 37 [Homo sapiens]
(SEQ ID NO: 589)
MGKLRRRYNIKGRQQAGPGPSKGPPEPPPVQLELEDKDTLKGVDA
SNALVLPGKKKKKTKAPPLSKKEKKPLTKKEKKVLQKILEQKEKK
SQRAEMLQKLSEVQASEAEMRLFYTTSKLGTGNRMYHTKEKADEV
VAPGQEKISSLSGAHRKRRRWPSAEEEEEEEEESESELEEESELD
EDPAAEPAEAGVGTTVAPLPPAPAPSSQPVPAGMTVPPPPAAAPP
LPRALAKPAVFIPVNRSPEMQEERLKLPILSEEQVIMEAVAEHPI
VIVCGETGSGKTTQVPQFLYEAGFSSEDSIIGVTEPRRVAAVAMS
QRVAKEMNLSQRVVSYQIRYEGNVTEETRIKFMTDGVLLKEIQKD
FLLLRYKVVIIDEAHERSVYTDILIGLLSRIVTLRAKRNLPLKLL
IMSATLRVEDFTQNPRLFAKPPPVIKVESRQFPVTVHFNKRTPLE
DYSGECFRKVCKIHRMLPAGGILVFLTGQAEVHALCRRLRKAFPP
SRARPQEKDDDQKDSVEEMRKFKKSRARAKKARAEVLPQINLDHY
SVLPAGEGDEDREAEVDEEEGALDSDLDLDLGDGGQDGGEQPDAS
LPLHVLPLYSLLAPEKQAQVFKPPPEGTRLCVVATNVAETSLTIP
GIKYVVDCGKVKKRYYDRVTGVSSFRVTWVSQASADQRAGRAGRT
EPGHCYRLYSSAVFGDFEQFPPPEITRRPVEDLILQMKALNVEKV
INFPFPTPPSVEALLAAEELLIALGALQPPQKAERVKQLQENRLS
CPITALGRTMATFPVAPRYAKMLALSRQHGCLPYAITIVASMTVR
ELFEELDRPAASDEELTRLKSKRARVAQMKRTWAGQGASLKLGDL
MVLLGAVGACEYASCTPQFCEANGLRYKAMMEIRRLRGQLTTAVN
AVCPEAELFVDPKMQPPTESQVTYLRQIVTAGLGDHLARRVQSEE
MLEDKWRNAYKTPLLDDPVFIHPSSVLFKELPEFVVYQEIVETTK
MYMKGVSSVEVQWIPALLPSYCQFDKPLEEPAPTYCPERGRVLCH
RASVFYRVGWPLPAIEVDFPEGIDRYKHFARFLLEGQVFRKLASY
RSCLLSSPGTMLKTWARLQPRTESLLRALVAEKADCHEALLAAWK
KNPKYLLAEYCEWLPQAMHPDIEKAWPPTTVH.

[0066] By “DEAH-box helicase 37 (DHX37) polynucleotide” is meant a polynucleotide encoding a DHX37 polypeptide, as well as the introns, exons, 3′ untranslated regions, 5′ untranslated regions, and regulatory sequences associated with its expression, or fragments thereof. In embodiments, a DHX37 polynucleotide is the genomic sequence, cDNA, mRNA, or gene associated with and/or required for DHX37 expression. An exemplary DHX37 nucleic acid sequence is provided below (GenBank Accession No. BC037964.1:82-3555).

>BC037964.1:82-3555 Homo sapiens DEAH (Asp-Glu-Ala-His) Box Polypeptide 37, mRNA (cDNA Clone MGC:46245 IMAGE:5736582), Complete Cds
ATGGGGAAGCTGCGCCGGCGCTACAACATCAAGGGGCGCCAGCAGGCGGGCCCCGGACCCTC GAAGGGCCCCCCCGAGCCGCCCCCCGTGCAGCTGGAACTGGAGGACAAGGACACGTTGAAGG GAGTTGATGCAAGCAACGCGCTCGTTCTACCGGGGAAGAAGAAAAAGAAGACCAAAGCCCCT CCCCTGTCGAAGAAGGAGAAGAAGCCTCTGACCAAGAAGGAGAAGAAAGTGCTGCAGAAAAT CTTAGAACAGAAGGAGAAAAAGAGCCAGCGAGCAGAGATGCTACAGAAGCTGAGTGAAGTCC AGGCTTCCGAAGCTGAGATGAGACTCTTTTATACCACTTCCAAGCTAGGCACTGGGAACCGC ATGTATCACACCAAAGAGAAGGCTGACGAGGTGGTAGCCCCGGGCCAGGAGAAGATCAGTAG CCTCAGCGGTGCCCACCGGAAGCGTCGCCGCTGGCCCTCAGCTGAGGAGGAGGAGGAGGAGG AGGAGGAGTCGGAATCGGAGCTGGAGGAGGAGTCGGAGCTGGACGAGGACCCAGCTGCTGAG CCGGCTGAGGCTGGTGTGGGGACCACCGTGGCACCTCTGCCGCCAGCTCCAGCACCCAGCAG TCAGCCCGTGCCGGCTGGGATGACTGTTCCTCCTCCTCCAGCTGCAGCCCCACCACTGCCCA GGGCCCTGGCTAAGCCCGCCGTCTTCATCCCCGTGAACCGCTCCCCGGAAATGCAGGAGGAA CGGCTGAAGCTCCCAATTCTCTCCGAAGAACAAGTAATCATGGAGGCTGTGGCCGAGCACCC CATCGTCATCGTGTGTGGTGAGACCGGCAGCGGGAAGACCACACAGGTGCCTCAGTTTCTCT ATGAAGCAGGCTTCAGCAGTGAAGACAGCATCATCGGTGTCACGGAGCCCCGCCGAGTGGCC GCCGTGGCCATGTCCCAGCGAGTGGCCAAGGAGATGAATCTGTCCCAGCGGGTCGTCTCCTA CCAGATCCGGTATGAAGGAAACGTGACAGAGGAGACCAGAATCAAGTTCATGACGGATGGTG TGCTGCTTAAAGAAATCCAGAAGGACTTCCTGCTGCTGCGGTACAAGGTGGTGATCATCGAC GAGGCCCACGAGAGGAGCGTGTACACGGACATCCTCATCGGCCTCCTGTCCCGCATTGTGAC TCTCCGGGCTAAGAGGAACCTGCCACTCAAGCTGCTCATCATGTCGGCCACGCTGCGGGTGG AGGACTTCACCCAGAACCCACGGCTCTTCGCCAAGCCGCCGCCGGTCATCAAGGTGGAATCC AGGCAGTTCCCAGTGACTGTGCATTTCAACAAGCGGACACCGCTGGAAGACTACAGTGGCGA GTGCTTCCGGAAGGTCTGCAAGATCCACCGGATGCTGCCCGCAGGTGGCATCCTGGTGTTCC TGACGGGGCAGGCTGAGGTGCATGCGCTGTGCCGCAGGCTCAGGAAGGCTTTCCCACCCTCC AGAGCCCGGCCACAAGAAAAGGACGACGATCAGAAAGACTCGGTGGAGGAAATGCGGAAGTT TAAGAAGTCAAGGGCCAGGGCCAAGAAGGCGCGGGCTGAGGTGCTGCCCCAGATCAACTTGG ATCATTACTCGGTGTTACCGGCAGGCGAAGGCGATGAGGACAGGGAGGCAGAAGTGGATGAG GAAGAGGGGGCCCTGGACTCCGACCTCGATCTGGACCTGGGGGATGGCGGGCAAGATGGAGG TGAGCAGCCGGATGCCTCCCTCCCGCTCCACGTGCTCCCGCTGTACTCTCTGCTGGCCCCAG AGAAGCAAGCACAGGTCTTTAAGCCTCCACCGGAGGGGACTCGGTTGTGTGTTGTGGCCACC AATGTGGCCGAGACGTCGCTTACCATCCCTGGCATCAAGTACGTGGTGGACTGTGGGAAGGT CAAGAAACGCTACTACGACCGCGTCACTGGCGTATCCTCCTTCCGTGTCACCTGGGTCTCCC AGGCATCAGCTGACCAGCGAGCGGGCAGAGCAGGACGGACGGAGCCCGGCCACTGCTACAGG CTGTATTCATCTGCGGTTTTTGGTGACTTCGAGCAGTTTCCTCCTCCAGAAATCACCCGGAG GCCTGTTGAAGACTTAATCCTTCAAATGAAGGCGCTCAACGTTGAAAAGGTCATCAACTTCC CCTTCCCGACGCCCCCCTCCGTGGAAGCCCTTCTTGCCGCCGAGGAGCTGTTGATCGCACTG GGTGCCCTGCAACCGCCCCAGAAAGCAGAAAGGGTGAAGCAACTGCAGGAGAACCGGCTGAG CTGCCCCATCACTGCGCTGGGCCGGACAATGGCCACGTTCCCCGTGGCACCCCGCTACGCTA AGATGCTGGCACTGAGCCGACAACACGGCTGCCTGCCCTATGCCATCACCATCGTGGCCAGC ATGACGGTGCGGGAGCTGTTTGAGGAGCTGGACAGACCAGCGGCCAGTGACGAGGAGCTCAC CAGGCTGAAGAGCAAGCGTGCCCGGGTGGCCCAGATGAAGAGGACCTGGGCAGGGCAGGGGG CTTCTCTGAAGCTCGGCGACCTCATGGTGCTGCTGGGCGCCGTGGGAGCCTGTGAGTATGCC AGCTGCACACCCCAGTTTTGCGAAGCCAACGGGCTGCGGTACAAAGCCATGATGGAGATCCG GCGCCTGCGGGGCCAGCTGACCACCGCAGTCAATGCCGTGTGCCCCGAGGCTGAGCTCTTCG TGGATCCCAAGATGCAGCCGCCCACCGAGAGCCAGGTGACCTACCTGCGACAGATCGTGACG GCAGGCCTGGGGGACCACTTGGCCCGCAGGGTCCAGAGCGAGGAGATGCTGGAGGACAAGTG GAGGAACGCCTACAAGACCCCTCTCCTCGACGACCCTGTCTTCATCCACCCCAGCTCCGTCC TTTTCAAAGAGCTCCCCGAGTTTGTGGTCTACCAGGAAATCGTGGAGACCACTAAGATGTAC ATGAAAGGCGTCTCTAGCGTGGAGGTCCAGTGGATCCCGGCCCTGCTGCCCTCTTACTGCCA GTTTGACAAGCCCCTGGAGGAACCAGCCCCTACATACTGCCCCGAGCGGGGGCGGGTGCTGT GTCACCGGGCCAGCGTGTTCTATCGCGTGGGCTGGCCGCTCCCCGCCATCGAGGTGGATTTT CCAGAGGGGATTGACCGCTACAAGCACTTTGCCCGGTTCCTGCTGGAAGGGCAGGTCTTCCG CAAGCTGGCCTCATACCGGAGCTGTCTGCTGTCCAGCCCCGGCACCATGCTGAAGACGTGGG CCAGGCTGCAGCCCCGTACGGAGAGCCTTCTGCGAGCCCTGGTTGCAGAGAAGGCTGACTGC CATGAAGCCTTGCTGGCTGCTTGGAAGAAAAACCCCAAATACCTGCTGGCTGAGTACTGTGA GTGGCTTCCACAGGCCATGCACCCCGATATCGAGAAAGCCTGGCCCCCCACCACTGTCCACT GA (SEQ ID NO: 590). An exemplary DHX37 gene sequence is provided at ENSEMBL Accession No. ENSG00000150990 (SEQ ID NO: 591).

[0067] By “DNA methyltransferase 3A (DNMT3A) polypeptide” is meant a protein having at least about 85% amino acid sequence identity to GenBank Accession No. AAD33084.2, which is provided below, or a fragment thereof having immunomodulatory activity.

>AAD33084.2 DNA cytosine methyltransferase
3 alpha [Homo sapiens]
(SEQ ID NO: 592)
MPAMPSSGPGDTSSSAAEREEDRKDGEEQEEPRGKEERQEPSTTA
RKVGRPGRKRKHPPVESGDTPKDPAVISKSPSMAQDSGASELLPN
GDLEKRSEPQPEEGSPAGGQKGGAPAEGEGAAETLPEASRAVENG
CCTPKEGRGAPAEAGKEQKETNIESMKMEGSRGRLRGGLGWESSL
RQRPMPRLTFQAGDPYYISKRKRDEWLARWKREAEKKAKVIAGMN
AVEENQGPGESQKVEEASPPAVQQPTDPASPTVATTPEPVGSDAG
DKNATKAGDDEPEYEDGRGFGIGELVWGKLRGFSWWPGRIVSWWM
TGRSRAAEGTRWVMWFGDGKFSVVCVEKLMPLSSFCSAFHQATYN
KQPMYRKAIYEVLQVASSRAGKLFPVCHDSDESDTAKAVEVQNKP
MIEWALGGFQPSGPKGLEPPEEEKNPYKEVYTDMWVEPEAAAYAP
PPPAKKPRKSTAEKPKVKEIIDERTRERLVYEVRQKCRNIEDICI
SCGSLNVTLEHPLFVGGMCQNCKNCFLECAYQYDDDGYQSYCTIC
CGGREVLMCGNNNCCRCFCVECVDLLVGPGAAQAAIKEDPWNCYM
CGHKGTYGLLRRREDWPSRLQMFFANNHDQEFDPPKVYPPVPAEK
RKPIRVLSLFDGIATGLLVLKDLGIQVDRYIASEVCEDSITVGMV
RHQGKIMYVGDVRSVTQKHIQEWGPFDLVIGGSPCNDLSIVNPAR
KGLYEGTGRLFFEFYRLLHDARPKEGDDRPFFWLFENVVAMGVSD
KRDISRFLESNPVMIDAKEVSAAHRARYFWGNLPGMNRPLASTVN
DKLELQECLEHGRIAKFSKVRTITTRSNSIKQGKDQHFPVFMNEK
EDILWCTEMERVFGFPVHYTDVSNMSRLARQRLLGRSWSVPVIRH
LFAPLKEYFACV.

[0068] By “DNA methyltransferase 3A (DNMT3A) polynucleotide” is meant a polynucleotide encoding a DNMT3A polypeptide, as well as the introns, exons, 3′ untranslated regions, 5′ untranslated regions, and regulatory sequences associated with its expression, or fragments thereof. In embodiments, a DNMT3A polynucleotide is the genomic sequence, cDNA, mRNA, or gene associated with and/or required for DNMT3A expression. An exemplary DNMT3A nucleic acid sequence is provided below (GenBank Accession No. AF067972.2:230-2968).

>AF067972.2:230-2968 Homo sapiens DNA Cytosine Methyltransferase 3 Alpha (DNMT3A) mRNA, Complete Cds
ATGCCCGCCATGCCCTCCAGCGGCCCCGGGGACACCAGCAGCTCTGCTGCGGAGCGGGAGGA GGACCGAAAGGACGGAGAGGAGCAGGAGGAGCCGCGTGGCAAGGAGGAGCGCCAAGAGCCCA GCACCACGGCACGGAAGGTGGGGCGGCCTGGGAGGAAGCGCAAGCACCCCCCGGTGGAAAGC GGTGACACGCCAAAGGACCCTGCGGTGATCTCCAAGTCCCCATCCATGGCCCAGGACTCAGG CGCCTCAGAGCTATTACCCAATGGGGACTTGGAGAAGCGGAGTGAGCCCCAGCCAGAGGAGG GGAGCCCTGCTGGGGGGCAGAAGGGCGGGGCCCCAGCAGAGGGAGAGGGTGCAGCTGAGACC CTGCCTGAAGCCTCAAGAGCAGTGGAAAATGGCTGCTGCACCCCCAAGGAGGGCCGAGGAGC CCCTGCAGAAGCGGGCAAAGAACAGAAGGAGACCAACATCGAATCCATGAAAATGGAGGGCT CCCGGGGCCGGCTGCGGGGTGGCTTGGGCTGGGAGTCCAGCCTCCGTCAGCGGCCCATGCCG AGGCTCACCTTCCAGGCGGGGGACCCCTACTACATCAGCAAGCGCAAGCGGGACGAGTGGCT GGCACGCTGGAAAAGGGAGGCTGAGAAGAAAGCCAAGGTCATTGCAGGAATGAATGCTGTGG AAGAAAACCAGGGGCCCGGGGAGTCTCAGAAGGTGGAGGAGGCCAGCCCTCCTGCTGTGCAG CAGCCCACTGACCCCGCATCCCCCACTGTGGCTACCACGCCTGAGCCCGTGGGGTCCGATGC TGGGGACAAGAATGCCACCAAAGCAGGCGATGACGAGCCAGAGTACGAGGACGGCCGGGGCT TTGGCATTGGGGAGCTGGTGTGGGGGAAACTGCGGGGCTTCTCCTGGTGGCCAGGCCGCATT GTGTCTTGGTGGATGACGGGCCGGAGCCGAGCAGCTGAAGGCACCCGCTGGGTCATGTGGTT CGGAGACGGCAAATTCTCAGTGGTGTGTGTTGAGAAGCTGATGCCGCTGAGCTCGTTTTGCA GTGCGTTCCACCAGGCCACGTACAACAAGCAGCCCATGTACCGCAAAGCCATCTACGAGGTC CTGCAGGTGGCCAGCAGCCGCGCGGGGAAGCTGTTCCCGGTGTGCCACGACAGCGATGAGAG TGACACTGCCAAGGCCGTGGAGGTGCAGAACAAGCCCATGATTGAATGGGCCCTGGGGGGCT TCCAGCCTTCTGGCCCTAAGGGCCTGGAGCCACCAGAAGAAGAGAAGAATCCCTACAAAGAA GTGTACACGGACATGTGGGTGGAACCTGAGGCAGCTGCCTACGCACCACCTCCACCAGCCAA AAAGCCCCGGAAGAGCACAGCGGAGAAGCCCAAGGTCAAGGAGATTATTGATGAGCGCACAA GAGAGCGGCTGGTGTACGAGGTGCGGCAGAAGTGCCGGAACATTGAGGACATCTGCATCTCC TGTGGGAGCCTCAATGTTACCCTGGAACACCCCCTCTTCGTTGGAGGAATGTGCCAAAACTG CAAGAACTGCTTTCTGGAGTGTGCGTACCAGTACGACGACGACGGCTACCAGTCCTACTGCA CCATCTGCTGTGGGGGCCGTGAGGTGCTCATGTGCGGAAACAACAACTGCTGCAGGTGCTTT TGCGTGGAGTGTGTGGACCTCTTGGTGGGGCCGGGGGCTGCCCAGGCAGCCATTAAGGAAGA CCCCTGGAACTGCTACATGTGCGGGCACAAGGGTACCTACGGGCTGCTGCGGCGGCGAGAGG ACTGGCCCTCCCGGCTCCAGATGTTCTTCGCTAATAACCACGACCAGGAATTTGACCCTCCA AAGGTTTACCCACCTGTCCCAGCTGAGAAGAGGAAGCCCATCCGGGTGCTGTCTCTCTTTGA TGGAATCGCTACAGGGCTCCTGGTGCTGAAGGACTTGGGCATTCAGGTGGACCGCTACATTG CCTCGGAGGTGTGTGAGGACTCCATCACGGTGGGCATGGTGCGGCACCAGGGGAAGATCATG TACGTCGGGGACGTCCGCAGCGTCACACAGAAGCATATCCAGGAGTGGGGCCCATTCGATCT GGTGATTGGGGGCAGTCCCTGCAATGACCTCTCCATCGTCAACCCTGCTCGCAAGGGCCTCT ACGAGGGCACTGGCCGGCTCTTCTTTGAGTTCTACCGCCTCCTGCATGATGCGCGGCCCAAG GAGGGAGATGATCGCCCCTTCTTCTGGCTCTTTGAGAATGTGGTGGCCATGGGCGTTAGTGA CAAGAGGGACATCTCGCGATTTCTCGAGTCCAACCCTGTGATGATTGATGCCAAAGAAGTGT CAGCTGCACACAGGGCCCGCTACTTCTGGGGTAACCTTCCCGGTATGAACAGGCCGTTGGCA TCCACTGTGAATGATAAGCTGGAGCTGCAGGAGTGTCTGGAGCATGGCAGGATAGCCAAGTT CAGCAAAGTGAGGACCATTACTACGAGGTCAAACTCCATAAAGCAGGGCAAAGACCAGCATT TTCCTGTCTTCATGAATGAGAAAGAGGACATCTTATGGTGCACTGAAATGGAAAGGGTATTT GGTTTCCCAGTCCACTATACTGACGTCTCCAACATGAGCCGCTTGGCGAGGCAGAGACTGCT GGGCCGGTCATGGAGCGTGCCAGTCATCCGCCACCTCTTCGCTCCGCTGAAGGAGTATTTTG CGTGTGTGTAA (SEQ ID NO: 593). An exemplary DHNMT3A gene sequence is provided at ENSEMBL Accession No. ENSG00000119772 (SEQ ID NO: 594).

[0069] By “Eukaryotic translation initiation factor 2A (EIF2A) polypeptide” is meant a protein having at least about 85% amino acid sequence identity to GenBank Accession No. AAH11885.1, which is provided below, or a fragment thereof having immunomodulatory activity.

>AAH11885.1 Eukaryotic translation initiation
factor 2A, 65 kDa [Homo sapiens]
(SEQ ID NO: 595)
MAPSTPLLTVRGSEGLYMVNGPPHFTESTVFPRESGKNCKVCIFS
KDGTLFAWGNGEKVNIISVTNKGLLHSFDLLKAVCLEFSPKNTVL
ATWQPYTTSKDGTAGIPNLQLYDVKTGTCLKSFIQKKMQNWCPSW
SEDETLCARNVNNEVHFFENNNFNTIANKLHLQKINDFVLSPGPQ
PYKVAVYVPGSKGAPSFVRLYQYPNFAGPHAALANKSFFKADKVT
MLWNKKATAVLVIASTDVDKTGASYYGEQTLHYIATNGESAVVQL
PKNGPIYDVVWNSSSTEFCAVYGFMPAKATIFNLKCDPVFDFGTG
PRNAAYYSPHGHILVLAGFGNLRGQMEVWDVKNYKLISKPVASDS
TYFAWCPDGEHILTATCAPRLRVNNGYKIWHYTGSILHKYDVPSN
AELWQVSWQPFLDGIFPAKTITYQAVPSEVPNEEPKVATAYRPPA
LRNKPITNSKLHEEEPPQNMKPQSGNDKPLSKTALKNQRKHEAKK
AAKQEARSDKSPDLAPTPAPQSTPRNTVSQSISGDPEIDKKIKNL
KKKLKAIEQLKEQAATGKQLEKNQLEKIQKETALLQELEDLKLGI.

[0070] By “Eukaryotic translation initiation factor 2A (EIF2A) polynucleotide” is meant a polynucleotide encoding a EIF2A polypeptide, as well as the introns, exons, 3′ untranslated regions, 5′ untranslated regions, and regulatory sequences associated with its expression, or fragments thereof. In embodiments, a EIF2A polynucleotide is the genomic sequence, cDNA, mRNA, or gene associated with and/or required for EIF2A expression. An exemplary EIF2A nucleic acid sequence is provided below (GenBank Accession No. BC011885.1:7-1764).

>BC011885.1:7-1764 Homo sapiens Eukaryotic Translation Initiation Factor 2A, 65 kDa, mRNA (cDNA Clone MGC:20557 IMAGE:3688407), Complete Cds
ATGGCGCCGTCCACGCCGCTCTTGACAGTCCGAGGATCAGAAGGACTGTACATGGTGAATGG ACCACCACATTTTACAGAAAGCACAGTGTTTCCAAGGGAATCTGGGAAGAATTGCAAAGTCT GTATCTTTAGTAAGGATGGGACCTTGTTTGCCTGGGGCAATGGAGAAAAAGTAAATATTATC AGTGTCACTAACAAGGGACTACTGCACTCCTTCGACCTCCTGAAGGCAGTTTGCCTTGAATT CTCACCCAAAAATACTGTCCTGGCAACGTGGCAGCCTTACACTACTTCTAAAGATGGCACAG CTGGGATACCCAACCTACAACTTTATGATGTGAAAACTGGGACATGTTTGAAATCTTTCATC CAGAAAAAAATGCAAAATTGGTGTCCATCCTGGTCAGAAGATGAAACTCTTTGTGCCCGCAA TGTTAACAATGAAGTTCACTTCTTTGAAAACAACAATTTTAACACAATTGCAAATAAATTGC ATTTGCAAAAAATTAATGACTTTGTATTATCACCTGGACCCCAACCATACAAGGTGGCTGTC TATGTTCCAGGAAGTAAAGGTGCACCTTCATTTGTTAGATTATATCAGTACCCCAACTTTGC TGGACCTCATGCAGCTTTAGCTAATAAAAGTTTCTTTAAGGCAGATAAAGTTACAATGCTGT GGAATAAAAAAGCTACTGCTGTGTTGGTAATAGCTAGCACAGATGTTGACAAGACAGGAGCT TCCTACTATGGAGAACAAACTCTACACTACATTGCAACAAATGGAGAAAGTGCTGTAGTGCA ATTACCAAAAAATGGCCCCATTTATGATGTAGTTTGGAATTCTAGTTCTACTGAGTTTTGTG CTGTATATGGTTTTATGCCTGCCAAAGCGACAATTTTCAACTTGAAATGTGATCCTGTATTT GACTTTGGAACTGGTCCTCGTAATGCAGCCTACTATAGCCCTCATGGACATATATTAGTATT AGCTGGATTTGGAAATCTGAGGGGACAAATGGAAGTGTGGGATGTGAAAAACTACAAACTTA TTTCTAAACCGGTGGCTTCTGATTCTACATATTTTGCTTGGTGCCCGGATGGTGAGCATATT TTAACAGCTACATGTGCTCCCAGGTTACGGGTTAATAATGGATACAAAATTTGGCATTATAC TGGCTCTATCTTGCACAAGTATGATGTGCCATCAAATGCAGAATTATGGCAGGTTTCTTGGC AGCCATTTTTGGATGGAATATTTCCAGCAAAAACAATAACTTACCAAGCAGTTCCAAGTGAA GTACCCAATGAGGAACCTAAAGTTGCAACAGCTTATAGACCCCCAGCTTTAAGAAATAAACC AATCACCAATTCCAAATTGCATGAAGAGGAACCACCTCAGAATATGAAACCACAATCAGGAA ACGATAAGCCATTATCAAAAACAGCTCTTAAAAATCAAAGGAAGCATGAAGCTAAGAAAGCT GCAAAGCAGGAAGCAAGAAGTGACAAGAGTCCAGATTTGGCACCTACTCCTGCCCCACAGAG CACACCACGAAACACTGTCTCTCAGTCAATTTCTGGGGACCCTGAGATAGACAAAAAAATCA AGAACCTAAAGAAGAAACTGAAAGCAATCGAACAACTGAAAGAACAAGCAGCAACTGGAAAA CAGCTAGAAAAAAATCAGTTGGAGAAATTCAGAAAGAAACAGCCCTTCTCCAGGAGCTGGA AGATTTGAAATTGGGTATTTAA (SEQ ID NO: 596). An exemplary EIF2A gene sequence is provided at ENSEMBL Accession No. ENSG00000144895 (SEQ ID NO: 597).

[0071] By “eomesodermin (EOMES) polypeptide” is meant a protein having at least about 85% amino acid sequence identity to GenBank accession number: CAB37939.1, provided below, or a fragment thereof and having immunomodulatory activity.

>CAB37939.1 eomesodermin protein, EOMES,
partial [Homo sapiens]
(SEQ ID NO: 598)
KQGRRMFPFLSFNINGLNPTAHYNVFVEVVLADPNHWRFQGGKWV
TSGKADNNMQGNKMYVHPESPNTGSHWMRQEISFGKLKLTNNKGA
NNNNTQMIVLQSLHKYQPRLHIVEVTEDGVEKDLNDPSKTQTFTF
SETQFIAVTAYQNTDITQLKIDHNPFAKGFR.

[0072] By “eomesodermin (EOMES) polynucleotide” is meant a polynucleotide encoding a EOMES polypeptide, as well as the introns, exons, 3′ untranslated regions, 5′ untranslated regions, and regulatory sequences associated with its expression, or fragments thereof. In embodiments, a EOMES polynucleotide is the genomic sequence, cDNA, mRNA, or gene associated with and/or required for EOMES expression. An exemplary EOMES nucleic acid sequence is provided below (GenBank Accession No. AJ010280.1).

>AJ010280.1 Homo sapiens mRNA Encoding Eomesodermin Protein, Partial
AAACAGGGCAGGCGCATGTTTCCTTTCTTGAGCTTCAACATAAACGGACTCAATCCCACTGC CCACTACAATGTGTTCGTAGAGGTGGTGCTGGCGGACCCCAACCACTGGCGCTTCCAGGGGG GCAAATGGGTGACCTCTGGCAAAGCCGACAATAACATGCAGGGCAACAAAATGTATGTTCAC CCAGAGTCTCCTAATACTGGTTCCCACTGGATGAGACAGGAGATTTCATTCGGGAAATTAAA ACTCACCAATAACAAAGGCGCAAATAACAACAACACCCAGATGATAGTCTTACAATCCTTAC ACAAATACCAACCCCGACTGCATATTGTTGAAGTTACAGAGGATGGCGTTGAGAAGGACTTG AATGATCCCTCAAAGACCCAGACTTTTACCTTCTCAGAAACGCAATTCATTGCTGTGACTGC CTACCAAAACACCGATATTACTCAACTAAAGATTGATCATAACCCCTTTGCAAAAGGCTTCA GA (SEQ ID NO: 599). An exemplary EOMES gene sequence is provided at ENSEMBL Accession No. ENSG00000163508 (SEQ ID NO: 600).

[0073] By “Friend leukemia integration 1 transcription factor (FLI-1 or FLI1) polypeptide” is meant a protein having at least about 85% amino acid sequence identity to GenBank Accession No. AAA58480.1, which is provided below, or a fragment thereof having immunomodulatory activity.

>AAA58480.1 FLI-1 [Homo sapiens]
(SEQ ID NO: 601)
MEGGLAGERARESPVDCSVSKCSKLVGGGESNPMNYNSYMDEKNG
PPPPNMTTNERRVIVPADATLVTQEHVRQWLEWAIKEYSLMEIDT
SFFQNMDGKELCKMNKEDFLRATTLYNTEVLLSHLSYLRESSLLA
YNTTSHTDQSSRLSVKEDPSYDSVRRGAWGNNMNSGLNKSPPLGG
AQTISKNTEQRPQPDPYQILGPTSSRLANPGSGQIQLWQFLLELL
SDSANASCITWEGINGEFKMTDPDEVARRWGQRKSKPNMNYDKLS
RALRYYYDKNIMTKVHGKRYAYKFDFHGIAQALQPHPTESSMYKY
PSDISYMPSYHAHQQKVNFVPPHPSSMPVTSSSFFGAASQYWTST
GGIYPNPNVPRHPNTHVPSHLGSYY.

[0074] By “Friend leukemia integration 1 transcription factor (FLI-1) polynucleotide” is meant a polynucleotide encoding a FLI-1 polypeptide, as well as the introns, exons, 3′ untranslated regions, 5′ untranslated regions, and regulatory sequences associated with its expression, or fragments thereof. In embodiments, a FLI-1 polynucleotide is the genomic sequence, cDNA, mRNA, or gene associated with and/or required for FLI-1 expression. An exemplary FLI-1 nucleic acid sequence is provided below (GenBank Accession No. M93255.1:543-1700).

>M93255.1:543-1700 Human FLI-1 mRNA, Complete Cds for Two Alternate Splicings
ATGGAGGGAGGACTGGCAGGCGAGCGGGCGAGGGAGTCTCCGGTGGACTGCAGCGTTAGCAA ATGCAGCAAGCTGGTGGGCGGAGGCGAGTCCAACCCCATGAACTACAACAGCTATATGGACG AGAAGAATGGCCCCCCTCCTCCCAACATGACCACCAACGAGAGGAGAGTCATCGTCCCCGCA GACGCCACACTGGTGACACAGGAGCATGTGAGGCAATGGCTGGAGTGGGCCATAAAGGAGTA CAGCTTGATGGAGATCGACACATCCTTTTTCCAGAACATGGATGGCAAGGAACTGTGTAAAA TGAACAAGGAGGACTTCCTCCGCGCCACCACCCTCTACAACACGGAAGTGCTGTTGTCACAC CTCAGTTACCTCAGGGAAAGTTCACTGCTGGCCTATAATACAACCTCCCACACCGACCAATC CTCACGATTGAGTGTCAAAGAAGACCCTTCTTATGACTCAGTCAGAAGAGGAGCTTGGGGCA ATAACATGAATTCTGGCCTCAACAAAAGTCCTCCCCTTGGAGGGGCACAAACGATCAGTAAG AATACAGAGCAACGGCCCCAGCCAGATCCGTATCAGATCCTGGGCCCGACCAGCAGTCGCCT AGCCAACCCTGGAAGCGGGCAGATCCAGCTGTGGCAATTCCTCCTGGAGCTGCTCTCCGACA GCGCCAACGCCAGCTGTATCACCTGGGAGGGGACCAACGGGGAGTTCAAAATGACGGACCCC GATGAGGTGGCCAGGCGCTGGGGGCAGCGGAAAAGCAAGCCCAACATGAATTACGACAAGCT GAGCCGGGCCCTCCGTTATTACTATGATAAAAACATTATGACCAAAGTGCACGGCAAAAGAT ATGCTTACAAATTTGACTTCCACGGCATTGCCCAGGCTCTGCAGCCACATCCGACCGAGTCG TCCATGTACAAGTACCCTTCTGACATCTCCTACATGCCTTCCTACCATGCCCACCAGCAGAA GGTGAACTTTGTCCCTCCCCATCCATCCTCCATGCCTGTCACTTCCTCCAGCTTCTTTGGAG CCGCATCACAATACTGGACCTCCACGGGGGGAATCTACCCCAACCCCAACGTCCCCCGCCAT CCTAACACCCACGTGCCTTCACACTTAGGCAGCTACTACTAG (SEQ ID NO: 602). An exemplary FLI-1 gene sequence is provided at ENSEMBL Accession No. ENSG00000151702 (SEQ ID NO: 603).

[0075] By “granzyme B (GZMB) polypeptide” is meant a protein having at least about 85% amino acid sequence identity to GenBank accession No. AAA75490.1, which is provided below, or a fragment thereof having immunomodulatory activity.

>AAA75490.1 granzyme B [Homo sapiens]
(SEQ ID NO: 604)
[sequence omitted]

[0076] By “granzyme B (GZMB) polynucleotide” is meant a nucleic acid molecule encoding an GZMB polypeptide, as well as the introns, exons, 3′ untranslated regions, 5′ untranslated regions, and regulatory sequences associated with its expression, or fragments thereof. An exemplary GZMB polynucleotide sequence is provided below (GenBank Accession No. M28879.1:1161-1215,2256-2403,2857-2992,3200-3460,4105-4248).

### >M28879.1:1161-1215,2256-2403,2857-2992,3200-3460,4105-4248 Human Granzyme B (CTLA-1) Gene, Complete Cds

ATGCAACCAATCCTGCTTCTGCTGGCCTTCCTCCTGCTGCCCAGGGCAGATGCAGGGGAGAT CATCGGGGGACATGAGGCCAAGCCCCACTCCCGCCCCTACATGGCTTATCTTATGATCTGGG ATCAGAAGTCTCTGAAGAGGTGCGGTGGCTTCCTGATACAAGACGACTTCGTGCTGACAGCT GCTCACTGTTGGGGAAGCTCCATAAATGTCACCTTGGGGGCCCACAATATCAAGGAACAGGA GCCGACCCAGCAGTTTATCCCTGTGAAAAGAGCCATCCCCCATCCAGCCTATAATCCTAAGA ACTTCTCCAATGACATCATGCTACTGCAGCTGGAGAGAAAGGCCAAGCGGACCAGAGCTGTG CAGCCCCTCAGGCTACCTAGCAACAAGGCCCAGGTGAAGCCAGGGCAGACATGCAGTGTGGC CGGCTGGGGGCAGACGGCCCCCCTGGGAAAACACTCACACACACTACAAGAGGTGAAGATGA CAGTGCAGGAAGATCGAAAGTGCGAATCTGACTTACGCCATTATTACGACAGTACCATTGAG TTGTGCGTGGGGGACCCAGAGATTAAAAAGACTTCCTTTAAGGGGGACTCTGGAGGCCCTCT TGTGTGTAACAAGGTGGCCCAGGGCATTGTCTCCTATGGACGAAACAATGGCATGCCTCCAC GAGCCTGCACCAAAGTCTCAAGCTTTGTACACTGGATAAAGAAAACCATGAAACGCTACTAA (SEQ ID NO: 605). An exemplary human GZMB polynucleotide sequence is provided at Ensembl Accession No. ENSG00000100453 (SEQ ID NO: 606).

[0077] By “Inhibitor of DNA binding (ID3) polypeptide” is meant a protein having at least about 85% amino acid sequence identity to GenBank Accession No. CAA51827.1, which is provided below, or a fragment thereof having immunomodulatory activity.

>CAA51827.1 Id3 [Homo sapiens]
(SEQ ID NO: 607)
MKALSPVRGCYEAVCCLSERSLAIARGRGKGPAAEEPLSLLDDMN
HCYSRLRELVPGVPRGTQLSQVEILQRVIDYILDLQVVLAEPAPG
PPDGPHLPIQTAELAPELVISNDKRSFCH.

[0078] By “Inhibitor of DNA binding (ID3) polynucleotide” is meant a polynucleotide encoding a ID3 polypeptide, as well as the introns, exons, 3′ untranslated regions, 5′ untranslated regions, and regulatory sequences associated with its expression, or fragments thereof. In embodiments, a ID3 polynucleotide is the genomic sequence, cDNA, mRNA, or gene associated with and/or required for ID3 expression. An exemplary ID3 nucleic acid sequence is provided below (GenBank Accession No. X73428.1:739-1038,1146-1205).

>X73428.1:739-1038,1146-1205 H. sapiens Id3 Gene for HLH Type Transcription Factor
ATGAAGGCGCTGAGCCCGGTGCGCGGCTGCTACGAGGCGGTGTGCTGCCTGTCGGAACGCAG TCTGGCCATCGCCCGGGGCCGAGGGAAGGGCCCGGCAGCTGAGGAGCCGCTGAGCTTGCTGG ACGACATGAACCACTGCTACTCCCGCCTGCGGGAACTGGTACCCGGAGTCCCGAGAGGCACT CAGCTTAGCCAGGTGGAAATCCTACAGCGCGTCATCGACTACATTCTCGACCTGCAGGTAGT CCTGGCCGAGCCAGCCCCTGGACCCCCTGATGGCCCCCACCTTCCCATCCAGACAGCCGAGC TCGCTCCGGAACTTGTCATCTCCAACGACAAAAGGAGCTTTTGCCACTGA (SEQ ID NO: 608). An exemplary ID3 gene sequence is provided at ENSEMBL Accession No. ENSG00000117318 (SEQ ID NO: 609).

[0079] By “Ikaros family zinc finger 2 (IKZF2) polypeptide” is meant a protein having at least about 85% amino acid sequence identity to GenBank Accession No. AAH28936.1, which is provided below, or a fragment thereof having immunomodulatory activity.

>AAH28936.1 IKAROS family zinc finger 2
(Helios) [Homo sapiens]
(SEQ ID NO: 610)
METEAIDGYITCDNELSPEREHSNMAIDLTSSTPNGQHASPSHMT
STNSVKLEMQSDEECDRKPLSREDEIRGHDEGSSLEEPLIESSEV
ADNRKVQELQGEGGIRLPNGERPFHCNQCGASFTQKGNLLRHIKL
HSGEKPFKCPFCSYACRRRDALTGHLRTHSVGKPHKCNYCGRSYK
QRSSLEEHKERCHNYLQNVSMEAAGQVMSHHVPPMEDCKEQEPIM
DNNISLVPFERPAVIEKLTGNMGKRKSSTPQKFVGEKLMRFSYPD
IHFDMNLTYEKEAELMQSHMMDQAINNAITYLGAEALHPLMQHPP
STIAEVAPVISSAYSQVYHPNRIERPISRETADSHENNMDGPISL
IRPKSRPQEREASPSNSCLDSTDSESSHDDHQSYQGHPALNPKRK
QSPAYMKEDVKALDTTKAPKGSLKDIYKVFNGEGEQIRAFKCEHC
RVLFLDHVMYTIHMGCHGYRDPLECNICGYRSQDRYEFSSHIVRG
EHTFH.

[0080] By “Ikaros family zinc finger 2 (IKZF2) polynucleotide” is meant a polynucleotide encoding a IKZF2 polypeptide, as well as the introns, exons, 3′ untranslated regions, 5′ untranslated regions, and regulatory sequences associated with its expression, or fragments thereof. In embodiments, a IKZF2 polynucleotide is the genomic sequence, cDNA, mRNA, or gene associated with and/or required for IKZF2 expression. An exemplary IKZF2 nucleic acid sequence is provided below (GenBank Accession No. BC028936.1:317-1819).

>BC028936.1:317-1819 Homo sapiens IKAROS Family Zinc Finger 2 (Helios), mRNA (cDNA Clone MGC:34330 IMAGE:4540576), Complete Cds
ATGGAAACAGAGGCTATTGATGGCTATATAACGTGTGACAATGAGCTTTCACCCGAAAGGGA GCACTCCAATATGGCAATTGACCTCACCTCAAGCACACCCAATGGACAGCATGCCTCACCAA GTCACATGACAAGCACAAATTCAGTAAAGCTAGAAATGCAGAGTGATGAAGAGTGTGACAGG AAACCCCTGAGCCGTGAAGATGAGATCAGGGGCCATGATGAGGGTAGCAGCCTAGAAGAACC CCTAATTGAGAGCAGCGAGGTGGCTGACAACAGGAAAGTCCAGGAGCTTCAAGGCGAGGGAG GAATCCGGCTTCCGAATGGTGAACGCCCCTTCCACTGTAACCAGTGTGGAGCTTCTTTTACT CAGAAGGGCAACCTTCTGAGACACATAAAGTTACACTCTGGAGAGAAGCCGTTCAAATGTCC TTTCTGTAGCTACGCCTGTAGAAGAAGGGACGCCCTCACAGGACACCTCAGGACCCATTCTG TGGGTAAACCTCACAAGTGCAACTACTGTGGACGAAGCTACAAGCAGCGCAGTTCACTGGAG GAGCACAAGGAACGCTGCCACAACTATCTCCAGAATGTCAGCATGGAGGCTGCTGGGCAGGT CATGAGTCACCATGTACCTCCTATGGAAGATTGTAAGGAACAAGAGCCTATTATGGACAACA ATATTTCTCTGGTGCCTTTTGAGAGACCTGCTGTCATAGAGAAGCTCACGGGGAATATGGGA AAACGTAAAAGCTCCACTCCACAAAAGTTTGTGGGGGAAAAGCTCATGCGATTCAGCTACCC AGATATTCACTTTGATATGAACTTAACATATGAGAAGGAGGCTGAGCTGATGCAGTCTCATA TGATGGACCAAGCCATCAACAATGCAATCACCTACCTTGGAGCTGAGGCCCTTCACCCTCTG ATGCAGCACCCGCCAAGCACAATCGCTGAAGTGGCCCCAGTTATAAGCTCAGCTTATTCTCA GGTCTATCATCCAAATAGGATAGAAAGACCCATTAGCAGGGAAACTGCTGATAGTCATGAAA ACAACATGGATGGCCCCATCTCTCTCATCAGACCAAAGAGTCGACCCCAGGAAAGAGAGGCC TCTCCCAGCAATAGCTGCCTGGATTCCACTGACTCAGAAAGCAGCCATGATGACCACCAGTC CTACCAAGGACACCCTGCCTTAAATCCCAAGAGGAAACAAAGCCCAGCTTACATGAAGGAGG ATGTCAAAGCTTTGGATACTACCAAGGCTCCTAAGGGCTCTCTGAAGGACATCTACAAGGTC TTCAATGGAGAAGGAGAACAGATTAGGGCCTTCAAGTGTGAGCACTGCCGAGTCCTTTTCCT AGACCATGTCATGTACACCATTCACATGGGTTGCCATGGCTACCGGGACCCACTGGAATGCA ACATCTGTGGCTACAGAAGCCAGGACCGTTATGAGTTTTCATCACACATTGTTCGAGGGGAG CACACATTCCACTAG (SEQ ID NO: 611). An exemplary IKZF2 gene sequence is provided at ENSEMBL Accession No. ENSG00000030419 (SEQ ID NO: 612).

[0081] By “Interleukin 6 (IL-6) polypeptide” is meant a protein having at least about 85% amino acid sequence identity to GenBank Accession No. AAC41704.1, which is provided below, or a fragment thereof having immunomodulatory activity.

>AAC41704.1 interleukin 6 [Homo sapiens]
(SEQ ID NO: 613)
MNSFSTSAFGPVAFSLGLLLVLPAAFPAPVPPGEDSKDVAAPHRQ
PLTSSERIDKQIRYILDGISALRKETCNKSNMCESSKEALAENNL
NLPKMAEKDGCFQSGFNEETCLVKIITGLLEFEVYLEYLQNRFES
SEEQARAVQMSTKVLIQFLQKKAKNLDAITTPDPTTNASLLTKLQ
AQNQWLQDMTTHLILRSFKEFLQSSLRALRQM.

[0082] By “Interleukin 6 (IL-6) polynucleotide” is meant a polynucleotide encoding a IL-6 polypeptide, as well as the introns, exons, 3′ untranslated regions, 5′ untranslated regions, and regulatory sequences associated with its expression, or fragments thereof. In embodiments, a IL-6 polynucleotide is the genomic sequence, cDNA, mRNA, or gene associated with and/or required for IL-6 expression. An exemplary IL-6 nucleic acid sequence is provided below (GenBank Accession No. M54894.1:51-689).

>M54894.1:51-689 Human Interleukin 6 mRNA, Complete Cds
ATGAACTCCTTCTCCACAAGCGCCTTCGGTCCAGTTGCCTTCTCCCTGGGGCTGCTCCTGGT GTTGCCTGCTGCCTTCCCTGCCCCAGTACCCCCAGGAGAAGATTCCAAAGATGTAGCCGCCC CACACAGACAGCCACTCACCTCTTCAGAACGAATTGACAAACAAATTCGGTACATCCTCGAC GGCATCTCAGCCCTGAGAAAGGAGACATGTAACAAGAGTAACATGTGTGAAAGCAGCAAAGA GGCACTGGCAGAAAACAACCTGAACCTTCCAAAGATGGCTGAAAAAGATGGATGCTTCCAAT CTGGATTCAATGAGGAGACTTGCCTGGTGAAAATCATCACTGGTCTTTTGGAGTTTGAGGTA TACCTAGAGTACCTCCAGAACAGATTTGAGAGTAGTGAGGAACAAGCCAGAGCTGTGCAGAT GAGTACAAAAGTCCTGATCCAGTTCCTGCAGAAAAAGGCAAAGAATCTAGATGCAATAACCA CCCCTGACCCAACCACAAATGCCAGCCTGCTGACGAAGCTGCAGGCACAGAACCAGTGGCTG CAGGACATGACAACTCATCTCATTCTGCGCAGCTTTAAGGAGTTCCTGCAGTCCAGCCTGAG GGCTCTTCGGCAAATGTAG (SEQ ID NO: 614). An exemplary IL-6 gene sequence is provided at ENSEMBL Accession No. ENSG00000136244 (SEQ ID NO: 615).

[0083] By “interferon gamma (IFN-G) polypeptide” is meant a protein having at least about 85% amino acid sequence identity to GenBank accession No. CAA44325.1, which is provided below, or a functional fragment thereof having immunomodulatory activity.

>CAA44325.1 interferon-gamma [Homo sapiens]
(SEQ ID NO: 616)
[sequence omitted]

[0084] By “interferon gamma (IFN-G; INFg) polynucleotide” is meant a nucleic acid molecule encoding an IFN-G polypeptide, as well as the introns, exons, 3′ untranslated regions, 5′ untranslated regions, and regulatory sequences associated with its expression, or fragments thereof. An exemplary INFg polynucleotide sequence is provided below (GenBank Accession No. X62468.1:13-447).

>X62468.1:13-447 H. sapiens mRNA for IFN-Gamma (pKC-0)
ATGCAAGACCCATATGTAAAAGAAGCAGAAAACCTTAAGAAATATTTTAATGCAGGTCATTC AGATGTAGCGGATAATGGAACTCTTTTCTTAGGCATTTTGAAGAATTGGAAAGAGGAGAGTG ACAGAAAAATAATGCAGAGCCAAATTGTCTCCTTTTACTTCAAACTTTTTAAAAACTTTAAA GATGACCAGAGCATCCAAAAGAGTGTGGAGACCATCAAGGAAGACATGAATGTCAAGTTTTT CAATAGCAACAAAAAGAAACGAGATGACTTCGAAAAGCTGACTAATTATTCGGTAACTGACT TGAATGTCCAACGCAAAGCAATACATGAACTCATCCAAGTGATGGCTGAACTGTCGCCAGCA GCTAAAACAGGGAAGCGAAAAAGGAGTCAGATGCTGTTTCGAGGTCGAAGAGCATCCCAGTA A (SEQ ID NO: 617). An exemplary human IFN-G polynucleotide sequence is provided at Ensembl Accession No. ENSG00000111537 (SEQ ID NO: 618).

[0085] By “interleukin-2 (IL-2) polypeptide” is meant a protein having at least about 85% amino acid sequence identity to GenBank Accession No. CAA23827.1, provided below, or a fragment thereof and having immunomodulatory activity.

>CAA23827.1 interleukin-2 [Homo sapiens]
(SEQ ID NO: 619)
MYRMQLLSCIALSLALVTNSAPTSSSTKKTQLQLEHLLLDLQMIL
NGINNYKNPKLTRMLTFKFYMPKKATELKHLQCLEEELKPLEEVL
NLAQSKNFHLRPRDLISNINVIVLELKGSETTFMCEYADETATIV
EFLNRWITFCQSIISTLT.

[0086] By “interleukin-2 (IL-2) polynucleotide” is meant a polynucleotide encoding an IL-2 polypeptide, as well as the introns, exons, 3′ untranslated regions, 5′ untranslated regions, and regulatory sequences associated with its expression, or fragments thereof. In embodiments, an IL-2 polynucleotide is the genomic sequence, cDNA, mRNA, or gene associated with and/or required for IL-2 expression. An exemplary IL-2 nucleic acid sequence is provided below (GenBank Accession No. V00564.1:48-509).

>V00564.1:48-509 Human mRNA Encoding Interleukin-2 (IL-2) a Lymphocyte Regulatory Molecule
ATGTACAGGATGCAACTCCTGTCTTGCATTGCACTAAGTCTTGCACTTGTCACAAACAGTGC ACCTACTTCAAGTTCTACAAAGAAAACACAGCTACAACTGGAGCATTTACTGCTGGATTTAC AGATGATTTTGAATGGAATTAATAATTACAAGAATCCCAAACTCACCAGGATGCTCACATTT AAGTTTTACATGCCCAAGAAGGCCACAGAACTGAAACATCTTCAGTGTCTAGAAGAAGAACT CAAACCTCTGGAGGAAGTGCTAAATTTAGCTCAAAGCAAAAACTTTCACTTAAGACCCAGGG ACTTAATCAGCAATATCAACGTAATAGTTCTGGAACTAAAGGGATCTGAAACAACATTCATG TGTGAATATGCTGATGAGACAGCAACCATTGTAGAATTTCTGAACAGATGGATTACCTTTTG TCAAAGCATCATCTCAACACTAACTTGA (SEQ ID NO: 620). An exemplary Interleukin-2 gene sequence is provided at ENSEMBL Accession No. ENSG00000057657 (SEQ ID NO: 621).

[0087] By “Marker of Proliferation KI67(KI67) polypeptide” is meant a protein having at least about 85% amino acid sequence identity to NCBI Reference Sequence No. NP 002408.3, provided below, or a fragment thereof and having immunomodulatory activity.

>NP_002408.3 proliferation marker protein
Ki-67 isoform 1
[Homo sapiens]
(SEQ ID NO: 622)
MWPTRRLVTIKRSGVDGPHFPLSLSTCLFGRGIECDIRIQLPVVS
KQHCKIETHEQEAILHNFSSTNPTQVNGSVIDEPVRLKHGDVITI
IDRSFRYENESLQNGRKSTEFPRKIREQEPARRVSRSSFSSDPDE
KAQDSKAYSKITEGKVSGNPQVHIKNVKEDSTADDSKDSVAQGTT
NVHSSEHAGRNGRNAADPISGDFKEISSVKLVSRYGELKSVPTTQ
CLDNSKKNESPFWKLYESVKKELDVKSQKENVLQYCRKSGLQTDY
ATEKESADGLQGETQLLVSRKSRPKSGGSGHAVAEPASPEQELDQ
NKGKGRDVESVQTPSKAVGASFPLYEPAKMKTPVQYSQQQNSPQK
HKNKDLYTTGRRESVNLGKSEGFKAGDKTLTPRKLSTRNRTPAKV
EDAADSATKPENLSSKTRGSIPTDVEVLPTETEIHNEPFLTLWLT
QVERKIQKDSLSKPEKLGTTAGQMCSGLPGLSSVDINNFGDSINE
SEGIPLKRRRVSFGGHLRPELFDENLPPNTPLKRGEAPTKRKSLV
MHTPPVLKKIIKEQPQPSGKQESGSEIHVEVKAQSLVISPPAPSP
RKTPVASDQRRRSCKTAPASSSKSQTEVPKRGGRKSGNLPSKRVS
ISRSQHDILQMICSKRRSGASEANLIVAKSWADVVKLGAKQTQTK
VIKHGPQRSMNKRQRRPATPKKPVGEVHSQFSTGHANSPCTIIIG
KAHTEKVHVPARPYRVLNNFISNQKMDFKEDLSGIAEMFKTPVKE
QPQLTSTCHIAISNSENLLGKQFQGTDSGEEPLLPTSESFGGNVF
FSAQNAAKQPSDKCSASPPLRRQCIRENGNVAKTPRNTYKMTSLE
TKTSDTETEPSKTVSTANRSGRSTEFRNIQKLPVESKSEETNTEI
VECILKRGQKATLLQQRREGEMKEIERPFETYKENIELKENDEKM
KAMKRSRTWGQKCAPMSDLTDLKSLPDTELMKDTARGQNLLQTQD
HAKAPKSEKGKITKMPCQSLQPEPINTPTHTKQQLKASLGKVGVK
EELLAVGKFTRTSGETTHTHREPAGDGKSIRTFKESPKQILDPAA
RVTGMKKWPRTPKEEAQSLEDLAGFKELFQTPGPSEESMTDEKTT
KIACKSPPPESVDTPTSTKQWPKRSLRKADVEEEFLALRKLTPSA
GKAMLTPKPAGGDEKDIKAFMGTPVQKLDLAGTLPGSKRQLQTPK
EKAQALEDLAGFKELFQTPGHTEELVAAGKTTKIPCDSPQSDPVD
TPTSTKQRPKRSIRKADVEGELLACRNLMPSAGKAMHTPKPSVGE
EKDIIIFVGTPVQKLDLTENLTGSKRRPQTPKEEAQALEDLTGFK
ELFQTPGHTEEAVAAGKTTKMPCESSPPESADTPTSTRRQPKTPL
EKRDVQKELSALKKLTQTSGETTHTDKVPGGEDKSINAFRETAKQ
KLDPAASVTGSKRHPKTKEKAQPLEDLAGLKELFQTPVCTDKPTT
HEKTTKIACRSQPDPVDTPTSSKPQSKRSLRKVDVEEEFFALRKR
TPSAGKAMHTPKPAVSGEKNIYAFMGTPVQKLDLTENLTGSKRRL
QTPKEKAQALEDLAGFKELFQTRGHTEESMTNDKTAKVACKSSQP
DPDKNPASSKRRLKTSLGKVGVKEELLAVGKLTQTSGETTHTHTE
PTGDGKSMKAFMESPKQILDSAASLTGSKRQLRTPKGKSEVPEDL
AGFIELFQTPSHTKESMTNEKTTKVSYRASQPDLVDTPTSSKPQP
KRSLRKADTEEEFLAFRKQTPSAGKAMHTPKPAVGEEKDINTFLG
TPVQKLDQPGNLPGSNRRLQTRKEKAQALEELTGFRELFQTPCTD
NPTTDEKTTKKILCKSPQSDPADTPTNTKQRPKRSLKKADVEEEF
LAFRKLTPSAGKAMHTPKAAVGEEKDINTFVGTPVEKLDLLGNLP
GSKRRPQTPKEKAKALEDLAGFKELFQTPGHTEESMTDDKITEVS
CKSPQPDPVKTPTSSKQRLKISLGKVGVKEEVLPVGKLTQTSGKT
TQTHRETAGDGKSIKAFKESAKQMLDPANYGTGMERWPRTPKEEA
QSLEDLAGFKELFQTPDHTEESTTDDKTTKIACKSPPPESMDTPT
STRRRPKTPLGKRDIVEELSALKQLTQTTHTDKVPGDEDKGINVF
RETAKQKLDPAASVTGSKRQPRTPKGKAQPLEDLAGLKELFQTPI
CTDKPTTHEKTTKIACRSPQPDPVGTPTIFKPQSKRSLRKADVEE
ESLALRKRTPSVGKAMDTPKPAGGDEKDMKAFMGTPVQKLDLPGN
LPGSKRWPQTPKEKAQALEDLAGFKELFQTPGTDKPTTDEKTTKI
ACKSPQPDPVDTPASTKQRPKRNLRKADVEEEFLALRKRTPSAGK
AMDTPKPAVSDEKNINTFVETPVQKLDLLGNLPGSKRQPQTPKEK
AEALEDLVGFKELFQTPGHTEESMTDDKITEVSCKSPQPESFKTS
RSSKQRLKIPLVKVDMKEEPLAVSKLTRTSGETTQTHTEPTGDSK
SIKAFKESPKQILDPAASVTGSRRQLRTRKEKARALEDLVDFKEL
FSAPGHTEESMTIDKNTKIPCKSPPPELTDTATSTKRCPKTRPRK
EVKEELSAVERLTQTSGQSTHTHKEPASGDEGIKVLKQRAKKKPN
PVEEEPSRRRPRAPKEKAQPLEDLAGFTELSETSGHTQESLTAGK
ATKIPCESPPLEVVDTTASTKRHLRTRVQKVQVKEEPSAVKFTQT
SGETTDADKEPAGEDKGIKALKESAKQTPAPAASVTGSRRRPRAP
RESAQAIEDLAGFKDPAAGHTEESMTDDKTTKIPCKSSPELEDTA
TSSKRRPRTRAQKVEVKEELLAVGKLTQTSGETTHTDKEPVGEGK
GTKAFKQPAKRKLDAEDVIGSRRQPRAPKEKAQPLEDLASFQELS
QTPGHTEELANGAADSFTSAPKQTPDSGKPLKISRRVLRAPKVEP
VGDVVSTRDPVKSQSKSNTSLPPLPFKRGGGKDGSVTGTKRLRCM
PAPEEIVEELPASKKQRVAPRARGKSSEPVVIMKRSLRTSAKRIE
PAEELNSNDMKTNKEEHKLQDSVPENKGISLRSRRQNKTEAEQQI
TEVFVLAERIEINRNEKKPMKTSPEMDIQNPDDGARKPIPRDKVT
ENKRCLRSARQNESSQPKVAEESGGQKSAKVLMQNQKGKGEAGNS
DSMCLRSRKTKSQPAASTLESKSVQRVTRSVKRCAENPKKAEDNV
CVKKIRTRSHRDSEDI.

[0088] By “Homo sapiens marker of proliferation Ki-67(Ki67) polynucleotide” is meant a polynucleotide encoding a Ki67 polypeptide, as well as the introns, exons, 3′ untranslated regions, 5′ untranslated regions, and regulatory sequences associated with its expression, or fragments thereof. In embodiments, a Ki67 polynucleotide is the genomic sequence, cDNA, mRNA, or gene associated with and/or required for Ki67 expression. An exemplary Ki67 nucleic acid sequence is provided below (NCBI Ref. Seq. No. NM_002417.5:415-10185).

>NM_002417.5:415-10185 Homo sapiens Marker of Proliferation Ki-67 (MKI67), Transcript Variant 1, mRNA
ATGTGGCCCACGAGACGCCTGGTTACTATCAAAAGGAGCGGGGTCGACGGTCCCCACTTTCC CCTGAGCCTCAGCACCTGCTTGTTTGGAAGGGGTATTGAATGTGACATCCGTATCCAGCTTC CTGTTGTGTCAAAACAACATTGCAAAATTGAAATCCATGAGCAGGAGGCAATATTACATAAT TTCAGTTCCACAAATCCAACACAAGTAAATGGGTCTGTTATTGATGAGCCTGTACGGCTAAA ACATGGAGATGTAATAACTATTATTGATCGTTCCTTCAGGTATGAAAATGAAAGTCTTCAGA ATGGAAGGAAGTCAACTGAATTTCCAAGAAAAATACGTGAACAGGAGCCAGCACGTCGTGTC TCAAGATCTAGCTTCTCTTCTGACCCTGATGAGAAAGCTCAAGATTCCAAGGCCTATTCAAA AATCACTGAAGGAAAAGTTTCAGGAAATCCTCAGGTACATATCAAGAATGTCAAAGAAGACA GTACCGCAGATGACTCAAAAGACAGTGTTGCTCAGGGAACAACTAATGTTCATTCCTCAGAA CATGCTGGACGTAATGGCAGAAATGCAGCTGATCCCATTTCTGGGGATTTTAAAGAAATTTC CAGCGTTAAATTAGTGAGCCGTTATGGAGAATTGAAGTCTGTTCCCACTACACAATGTCTTG ACAATAGCAAAAAAAATGAATCTCCCTTTTGGAAGCTTTATGAGTCAGTGAAGAAAGAGTTG GATGTAAAATCACAAAAAGAAAATGTCCTACAGTATTGTAGAAAATCTGGATTACAAACTGA TTACGCAACAGAGAAAGAAAGTGCTGATGGTTTACAGGGGGAGACCCAACTGTTGGTCTCGC GTAAGTCAAGACCAAAATCTGGTGGGAGCGGCCACGCTGTGGCAGAGCCTGCTTCACCTGAA CAAGAGCTTGACCAGAACAAGGGGAAGGGAAGAGACGTGGAGTCTGTTCAGACTCCCAGCAA GGCTGTGGGCGCCAGCTTTCCTCTCTATGAGCCGGCTAAAATGAAGACCCCTGTACAATATT CACAGCAACAAAATTCTCCACAAAAACATAAGAACAAAGACCTGTATACTACTGGTAGAAGA GAATCTGTGAATCTGGGTAAAAGTGAAGGCTTCAAGGCTGGTGATAAAACTCTTACTCCCAG GAAGCTTTCAACTAGAAATCGAACACCAGCTAAAGTTGAAGATGCAGCTGACTCTGCCACTA AGCCAGAAAATCTCTCTTCCAAAACCAGAGGAAGTATTCCTACAGATGTGGAAGTTCTGCCT ACGGAAACTGAAATTCACAATGAGCCATTTTTAACTCTGTGGCTCACTCAAGTTGAGAGGAA GATCCAAAAGGATTCCCTCAGCAAGCCTGAGAAATTGGGCACTACAGCTGGACAGATGTGCT CTGGGTTACCTGGTCTTAGTTCAGTTGATATCAACAACTTTGGTGATTCCATTAATGAGAGT GAGGGAATACCTTTGAAAAGAAGGCGTGTGTCCTTTGGTGGGCACCTAAGACCTGAACTATT TGATGAAAACTTGCCTCCTAATACGCCTCTCAAAAGGGGAGAAGCCCCAACCAAAAGAAAGT CTCTGGTAATGCACACTCCACCTGTCCTGAAGAAAATCATCAAGGAACAGCCTCAACCATCA GGAAAACAAGAGTCAGGTTCAGAAATCCATGTGGAAGTGAAGGCACAAAGCTTGGTTATAAG CCCTCCAGCTCCTAGTCCTAGGAAAACTCCAGTTGCCAGTGATCAACGCCGTAGGTCCTGCA AAACAGCCCCTGCTTCCAGCAGCAAATCTCAGACAGAGGTTCCTAAGAGAGGAGGGAGAAAG AGTGGCAACCTGCCTTCAAAGAGAGTGTCTATCAGCCGAAGTCAACATGATATTTTACAGAT GATATGTTCCAAAAGAAGAAGTGGTGCTTCGGAAGCAAATCTGATTGTTGCAAAATCATGGG CAGATGTAGTAAAACTTGGTGCAAAACAAACACAAACTAAAGTCATAAAACATGGTCCTCAA AGGTCAATGAACAAAAGGCAAAGAAGACCTGCTACTCCAAAGAAGCCTGTGGGCGAAGTTCA CAGTCAATTTAGTACAGGCCACGCAAACTCTCCTTGTACCATAATAATAGGGAAAGCTCATA CTGAAAAAGTACATGTGCCTGCTCGACCCTACAGAGTGCTCAACAACTTCATTTCCAACCAA AAAATGGACTTTAAGGAAGATCTTTCAGGAATAGCTGAAATGTTCAAGACCCCAGTGAAGGA GCAACCGCAGTTGACAAGCACATGTCACATCGCTATTTCAAATTCAGAGAATTTGCTTGGAA AACAGTTTCAAGGAACTGATTCAGGAGAAGAACCTCTGCTCCCCACCTCAGAGAGTTTTGGA GGAAATGTGTTCTTCAGTGCACAGAATGCAGCAAAACAGCCATCTGATAAATGCTCTGCAAG CCCTCCCTTAAGACGGCAGTGTATTAGAGAAAATGGAAACGTAGCAAAAACGCCCAGGAACA CCTACAAAATGACTTCTCTGGAGACAAAAACTTCAGATACTGAGACAGAGCCTTCAAAAACA GTATCCACTGCAAACAGGTCAGGAAGGTCTACAGAGTTCAGGAATATACAGAAGCTACCTGT GGAAAGTAAGAGTGAAGAAACAAATACAGAAATTGTTGAGTGCATCCTAAAAAGAGGTCAGA AGGCAACACTACTACAACAAAGGAGAGAAGGAGAGATGAAGGAAATAGAAAGACCTTTTGAG ACATATAAGGAAAATATTGAATTAAAAGAAAACGATGAAAAGATGAAAGCAATGAAGAGATC AAGAACTTGGGGGCAGAAATGTGCACCAATGTCTGACCTGACAGACCTCAAGAGCTTGCCTG ATACAGAACTCATGAAAGACACGGCACGTGGCCAGAATCTCCTCCAAACCCAAGATCATGCC AAGGCACCAAAGAGTGAGAAAGGCAAAATCACTAAAATGCCCTGCCAGTCATTACAACCAGA ACCAATAAACACCCCAACACACACAAAACAACAGTTGAAGGCATCCCTGGGGAAAGTAGGTG TGAAAGAAGAGCTCCTAGCAGTCGGCAAGTTCACACGGACGTCAGGGGAGACCACGCACACG CACAGAGAGCCAGCAGGAGATGGCAAGAGCATCAGAACGTTTAAGGAGTCTCCAAAGCAGAT CCTGGACCCAGCAGCCCGTGTAACTGGAATGAAGAAGTGGCCAAGAACGCCTAAGGAAGAGG CCCAGTCACTAGAAGACCTGGCTGGCTTCAAAGAGCTCTTCCAGACACCAGGTCCCTCTGAG GAATCAATGACTGATGAGAAAACTACCAAAATAGCCTGCAAATCTCCACCACCAGAATCAGT GGACACTCCAACAAGCACAAAGCAATGGCCTAAGAGAAGTCTCAGGAAAGCAGATGTAGAGG AAGAATTCTTAGCACTCAGGAAACTAACACCATCAGCAGGGAAAGCCATGCTTACGCCCAAA CCAGCAGGAGGTGATGAGAAAGACATTAAAGCATTTATGGGAACTCCAGTGCAGAAACTGGA CCTGGCAGGAACTTTACCTGGCAGCAAAAGACAGCTACAGACTCCTAAGGAAAAGGCCCAGG CTCTAGAAGACCTGGCTGGCTTTAAAGAGCTCTTCCAGACTCCTGGTCACACCGAGGAATTA GTGGCTGCTGGTAAAACCACTAAAATACCCTGCGACTCTCCACAGTCAGACCCAGTGGACAC CCCAACAAGCACAAAGCAACGACCCAAGAGAAGTATCAGGAAAGCAGATGTAGAGGGAGAAC TCTTAGCGTGCAGGAATCTAATGCCATCAGCAGGCAAAGCCATGCACACGCCTAAACCATCA GTAGGTGAAGAGAAAGACATCATCATATTTGTGGGAACTCCAGTGCAGAAACTGGACCTGAC AGAGAACTTAACCGGCAGCAAGAGACGGCCACAAACTCCTAAGGAAGAGGCCCAGGCTCTGG AAGACCTGACTGGCTTTAAAGAGCTCTTCCAGACCCCTGGTCATACTGAAGAAGCAGTGGCT GCTGGCAAAACTACTAAAATGCCCTGCGAATCTTCTCCACCAGAATCAGCAGACACCCCAAC AAGCACAAGAAGGCAGCCCAAGACACCTTTGGAGAAAAGGGACGTACAGAAGGAGCTCTCAG CCCTGAAGAAGCTCACACAGACATCAGGGGAAACCACACACACAGATAAAGTACCAGGAGGT GAGGATAAAAGCATCAACGCGTTTAGGGAAACTGCAAAACAGAAACTGGACCCAGCAGCAAG TGTAACTGGTAGCAAGAGGCACCCAAAAACTAAGGAAAAGGCCCAACCCCTAGAAGACCTGG CTGGCTTGAAAGAGCTCTTCCAGACACCAGTATGCACTGACAAGCCCACGACTCACGAGAAA ACTACCAAAATAGCCTGCAGATCACAACCAGACCCAGTGGACACACCAACAAGCTCCAAGCC ACAGTCCAAGAGAAGTCTCAGGAAAGTGGACGTAGAAGAAGAATTCTTCGCACTCAGGAAAC GAACACCATCAGCAGGCAAAGCCATGCACACACCCAAACCAGCAGTAAGTGGTGAGAAAAAC ATCTACGCATTTATGGGAACTCCAGTGCAGAAACTGGACCTGACAGAGAACTTAACTGGCAG CAAGAGACGGCTACAAACTCCTAAGGAAAAGGCCCAGGCTCTAGAAGACCTGGCTGGCTTTA AAGAGCTCTTCCAGACACGAGGTCACACTGAGGAATCAATGACTAACGATAAAACTGCCAAA GTAGCCTGCAAATCTTCACAACCAGACCCAGACAAAAACCCAGCAAGCTCCAAGCGACGGCT CAAGACATCCCTGGGGAAAGTGGGCGTGAAAGAAGAGCTCCTAGCAGTTGGCAAGCTCACAC AGACATCAGGAGAGACTACACACACACACACAGAGCCAACAGGAGATGGTAAGAGCATGAAA GCATTTATGGAGTCTCCAAAGCAGATCTTAGACTCAGCAGCAAGTCTAACTGGCAGCAAGAG GCAGCTGAGAACTCCTAAGGGAAAGTCTGAAGTCCCTGAAGACCTGGCCGGCTTCATCGAGC TCTTCCAGACACCAAGTCACACTAAGGAATCAATGACTAACGAAAAAACTACCAAAGTATCC TACAGAGCTTCACAGCCAGACCTAGTGGACACCCCAACAAGCTCCAAGCCACAGCCCAAGAG AAGTCTCAGGAAAGCAGACACTGAAGAAGAATTTTTAGCATTTAGGAAACAAACGCCATCAG CAGGCAAAGCCATGCACACACCCAAACCAGCAGTAGGTGAAGAGAAAGACATCAACACGTTT TTGGGAACTCCAGTGCAGAAACTGGACCAGCCAGGAAATTTACCTGGCAGCAATAGACGGCT ACAAACTCGTAAGGAAAAGGCCCAGGCTCTAGAAGAACTGACTGGCTTCAGAGAGCTTTTCC AGACACCATGCACTGATAACCCCACGACTGATGAGAAAACTACCAAAAAAATACTCTGCAAA TCTCCGCAATCAGACCCAGCGGACACCCCAACAAACACAAAGCAACGGCCCAAGAGAAGCCT CAAGAAAGCAGACGTAGAGGAAGAATTTTTAGCATTCAGGAAACTAACACCATCAGCAGGCA AAGCCATGCACACGCCTAAAGCAGCAGTAGGTGAAGAGAAAGACATCAACACATTTGTGGGG ACTCCAGTGGAGAAACTGGACCTGCTAGGAAATTTACCTGGCAGCAAGAGACGGCCACAAAC TCCTAAAGAAAAGGCCAAGGCTCTAGAAGATCTGGCTGGCTTCAAAGAGCTCTTCCAGACAC CAGGTCACACTGAGGAATCAATGACCGATGACAAAATCACAGAAGTATCCTGCAAATCTCCA CAACCAGACCCAGTCAAAACCCCAACAAGCTCCAAGCAACGACTCAAGATATCCTTGGGGAA AGTAGGTGTGAAAGAAGAGGTCCTACCAGTCGGCAAGCTCACACAGACGTCAGGGAAGACCA CACAGACACACAGAGAGACAGCAGGAGATGGAAAGAGCATCAAAGCGTTTAAGGAATCTGCA AAGCAGATGCTGGACCCAGCAAACTATGGAACTGGGATGGAGAGGTGGCCAAGAACACCTAA GGAAGAGGCCCAATCACTAGAAGACCTGGCCGGCTTCAAAGAGCTCTTCCAGACACCAGACC ACACTGAGGAATCAACAACTGATGACAAAACTACCAAAATAGCCTGCAAATCTCCACCACCA GAATCAATGGACACTCCAACAAGCACAAGGAGGCGGCCCAAAACACCTTTGGGGAAAAGGGA TATAGTGGAAGAGCTCTCAGCCCTGAAGCAGCTCACACAGACCACACACACAGACAAAGTAC CAGGAGATGAGGATAAAGGCATCAACGTGTTCAGGGAAACTGCAAAACAGAAACTGGACCCA GCAGCAAGTGTAACTGGTAGCAAGAGGCAGCCAAGAACTCCTAAGGGAAAAGCCCAACCCCT AGAAGACTTGGCTGGCTTGAAAGAGCTCTTCCAGACACCAATATGCACTGACAAGCCCACGA CTCATGAGAAAACTACCAAAATAGCCTGCAGATCTCCACAACCAGACCCAGTGGGTACCCCA ACAATCTTCAAGCCACAGTCCAAGAGAAGTCTCAGGAAAGCAGACGTAGAGGAAGAATCCTT AGCACTCAGGAAACGAACACCATCAGTAGGGAAAGCTATGGACACACCCAAACCAGCAGGAG GTGATGAGAAAGACATGAAAGCATTTATGGGAACTCCAGTGCAGAAATTGGACCTGCCAGGA AATTTACCTGGCAGCAAAAGATGGCCACAAACTCCTAAGGAAAAGGCCCAGGCTCTAGAAGA CCTGGCTGGCTTCAAAGAGCTCTTCCAGACACCAGGCACTGACAAGCCCACGACTGATGAGA AAACTACCAAAATAGCCTGCAAATCTCCACAACCAGACCCAGTGGACACCCCAGCAAGCACA AAGCAACGGCCCAAGAGAAACCTCAGGAAAGCAGACGTAGAGGAAGAATTTTTAGCACTCAG GAAACGAACACCATCAGCAGGCAAAGCCATGGACACACCAAAACCAGCAGTAAGTGATGAGA AAAATATCAACACATTTGTGGAAACTCCAGTGCAGAAACTGGACCTGCTAGGAAATTTACCT GGCAGCAAGAGACAGCCACAGACTCCTAAGGAAAAGGCTGAGGCTCTAGAGGACCTGGTTGG CTTCAAAGAACTCTTCCAGACACCAGGTCACACTGAGGAATCAATGACTGATGACAAAATCA CAGAAGTATCCTGTAAATCTCCACAGCCAGAGTCATTCAAAACCTCAAGAAGCTCCAAGCAA AGGCTCAAGATACCCCTGGTGAAAGTGGACATGAAAGAAGAGCCCCTAGCAGTCAGCAAGCT CACACGGACATCAGGGGAGACTACGCAAACACACACAGAGCCAACAGGAGATAGTAAGAGCA TCAAAGCGTTTAAGGAGTCTCCAAAGCAGATCCTGGACCCAGCAGCAAGTGTAACTGGTAGC AGGAGGCAGCTGAGAACTCGTAAGGAAAAGGCCCGTGCTCTAGAAGACCTGGTTGACTTCAA AGAGCTCTTCTCAGCACCAGGTCACACTGAAGAGTCAATGACTATTGACAAAAACACAAAAA TTCCCTGCAAATCTCCCCCACCAGAACTAACAGACACTGCCACGAGCACAAAGAGATGCCCC AAGACACGTCCCAGGAAAGAAGTAAAAGAGGAGCTCTCAGCAGTTGAGAGGCTCACGCAAAC ATCAGGGCAAAGCACACACACACACAAAGAACCAGCAAGCGGTGATGAGGGCATCAAAGTAT TGAAGCAACGTGCAAAGAAGAAACCAAACCCAGTAGAAGAGGAACCCAGCAGGAGAAGGCCA AGAGCACCTAAGGAAAAGGCCCAACCCCTGGAAGACCTGGCCGGCTTCACAGAGCTCTCTGA AACATCAGGTCACACTCAGGAATCACTGACTGCTGGCAAAGCCACTAAAATACCCTGCGAAT CTCCCCCACTAGAAGTGGTAGACACCACAGCAAGCACAAAGAGGCATCTCAGGACACGTGTG CAGAAGGTACAAGTAAAAGAAGAGCCTTCAGCAGTCAAGTTCACACAAACATCAGGGGAAAC CACGGATGCAGACAAAGAACCAGCAGGTGAAGATAAAGGCATCAAAGCATTGAAGGAATCTG CAAAACAGACACCGGCTCCAGCAGCAAGTGTAACTGGCAGCAGGAGACGGCCAAGAGCACCC AGGGAAAGTGCCCAAGCCATAGAAGACCTAGCTGGCTTCAAAGACCCAGCAGCAGGTCACAC TGAAGAATCAATGACTGATGACAAAACCACTAAAATACCCTGCAAATCATCACCAGAACTAG AAGACACCGCAACAAGCTCAAAGAGACGGCCCAGGACACGTGCCCAGAAAGTAGAAGTGAAG GAGGAGCTGTTAGCAGTTGGCAAGCTCACACAAACCTCAGGGGAGACCACGCACACCGACAA AGAGCCGGTAGGTGAGGGCAAAGGCACGAAAGCATTTAAGCAACCTGCAAAGCGGAAGCTGG ACGCAGAAGATGTAATTGGCAGCAGGAGACAGCCAAGAGCACCTAAGGAAAAGGCCCAACCC CTGGAAGATCTGGCCAGCTTCCAAGAGCTCTCTCAAACACCAGGCCACACTGAGGAACTGGC AAATGGTGCTGCTGATAGCTTTACAAGCGCTCCAAAGCAAACACCTGACAGTGGAAAACCTC TAAAAATATCCAGAAGAGTTCTTCGGGCCCCTAAAGTAGAACCCGTGGGAGACGTGGTAAGC ACCAGAGACCCTGTAAAATCACAAAGCAAAAGCAACACTTCCCTGCCCCCACTGCCCTTCAA GAGGGGAGGTGGCAAAGATGGAAGCGTCACGGGAACCAAGAGGCTGCGCTGCATGCCAGCAC CAGAGGAAATTGTGGAGGAGCTGCCAGCCAGCAAGAAGCAGAGGGTTGCTCCCAGGGCAAGA GGCAAATCATCCGAACCCGTGGTCATCATGAAGAGAAGTTTGAGGACTTCTGCAAAAAGAAT TGAACCTGCGGAAGAGCTGAACAGCAACGACATGAAAACCAACAAAGAGGAACACAAATTAC AAGACTCGGTCCCTGAAAATAAGGGAATATCCCTGCGCTCCAGACGCCAAAATAAGACTGAG GCAGAACAGCAAATAACTGAGGTCTTTGTATTAGCAGAAAGAATAGAAATAAACAGAAATGA AAAGAAGCCCATGAAGACCTCCCCAGAGATGGACATTCAGAATCCAGATGATGGAGCCCGGA AACCCATACCTAGAGACAAAGTCACTGAGAACAAAAGGTGCTTGAGGTCTGCTAGACAGAAT GAGAGCTCCCAGCCTAAGGTGGCAGAGGAGAGCGGAGGGCAGAAGAGTGCGAAGGTTCTCAT GCAGAATCAGAAAGGGAAAGGAGAAGCAGGAAATTCAGACTCCATGTGCCTGAGATCAAGAA AGACAAAAAGCCAGCCTGCAGCAAGCACTTTGGAGAGCAAATCTGTGCAGAGAGTAACGCGG AGTGTCAAGAGGTGTGCAGAAAATCCAAAGAAGGCTGAGGACAATGTGTGTGTCAAGAAAAT AAGAACCAGAAGTCATAGGGACAGTGAAGATATTTGA (SEQ ID NO: 623). An exemplary Ki67 gene sequence is provided at ENSEMBL Accession No. ENSG00000148773 (SEQ ID NO: 624).

[0089] By “programmed cell death 1 (PD1) polypeptide” is meant a protein having at least about 85% amino acid sequence identity to GenBank Accession No. AJS10360.1, which is provided below, or a fragment thereof having immunomodulatory activity.

>AJS10360.1 programmed cell death 1 protein
[Homo sapiens]
(SEQ ID NO: 628)
MQIPQAPWPVVWAVLQLGWRPGWFLDSPDRPWNPPTFSPALLVVT
EGDNATFTCSFSNTSESFVLNWYRMSPSNQTDKLAAFPEDRSQPG
QDCRFRVTQLPNGRDFHMSVVRARRNDSGTYLCGAISLAPKAQIK
ESLRAELRVTERRAEVPTAHPSPSPRPAGQFQTLVVGVVGGLLGS
LVLLVWVLAVICSRAARGTIGARRTGQPLKEDPSAVPVFSVDYGE
LDFQWREKTPEPPVPCVPEQTEYATIVFPSGMGTSSPARRGSADG
PRSAQPLRPEDGHCSWPL.

[0090] By “programmed cell death 1 (PD1) polynucleotide” is meant a nucleic acid molecule encoding a PD1 polypeptide, as well as the introns, exons, 3′ untranslated regions, 5′ untranslated regions, and regulatory sequences associated with its expression, or fragments thereof. An exemplary PD1 polynucleotide sequence is provided at GenBank Accession No. KJ865861.1, which is provided below.

>KJ865861.1 Homo sapiens Cell-Line G3361 Programmed Cell Death 1 Protein (PDCD1) mRNA, Complete Cds
ATGCAGATCCCACAGGCGCCCTGGCCAGTCGTCTGGGCGGTGCTACAACTGGGCTGGCGGCC AGGATGGTTCTTAGACTCCCCAGACAGGCCCTGGAACCCCCCCACCTTCTCCCCAGCCCTGC TCGTGGTGACCGAAGGGGACAACGCCACCTTCACCTGCAGCTTCTCCAACACATCGGAGAGC TTCGTGCTAAACTGGTACCGCATGAGCCCCAGCAACCAGACGGACAAGCTGGCCGCCTTCCC CGAGGACCGCAGCCAGCCCGGCCAGGACTGCCGCTTCCGTGTCACACAACTGCCCAACGGGC GTGACTTCCACATGAGCGTGGTCAGGGCCCGGCGCAATGACAGCGGCACCTACCTCTGTGGG GCCATCTCCCTGGCCCCCAAGGCGCAGATCAAAGAGAGCCTGCGGGCAGAGCTCAGGGTGAC AGAGAGAAGGGCAGAAGTGCCCACAGCCCACCCCAGCCCCTCACCCAGGCCAGCCGGCCAGT TCCAAACCCTGGTGGTTGGTGTCGTGGGCGGCCTGCTGGGCAGCCTGGTGCTGCTAGTCTGG GTCCTGGCCGTCATCTGCTCCCGGGCCGCACGAGGGACAATAGGAGCCAGGCGCACCGGCCA GCCCCTGAAGGAGGACCCCTCAGCCGTGCCTGTGTTCTCTGTGGACTATGGGGAGCTGGATT TCCAGTGGCGAGAGAAGACCCCGGAGCCCCCCGTGCCCTGTGTCCCTGAGCAGACGGAGTAT GCCACCATTGTCTTTCCTAGCGGAATGGGCACCTCATCCCCCGCCCGCAGGGGCTCAGCCGA CGGCCCTCGGAGTGCCCAGCCACTGAGGCCTGAGGATGGACACTGCTCTTGGCCCCTCTGA (SEQ ID NO: 629). An exemplary PD1 polynucleotide sequence is also provided at Ensenbl accession no: ENSG00000188389 (SEQ ID NO: 630).

[0091] By “Profilin 1 (PFN1) polypeptide” is meant a protein having at least about 85% amino acid sequence identity to GenBank Accession No. AAH02475.1, which is provided below, or a fragment thereof having immunomodulatory activity.

>AAH02475.1 Profilin 1
[Homo sapiens]
(SEQ ID NO: 631)
MAGWNAYIDNLMADGTCQDAAIVGYKDSPSVWAAVPGKTFVNITP
AEVGVLVGKDRSSFYVNGLTLGGQKCSVIRDSLLQDGEFSMDLRT
KSTGGAPTFNVTVTKTDKTLVLLMGKEGVHGGLINKKCYEMASHL
RRSQY.

[0092] By “Profilin 1 (PFN1) polynucleotide” is meant a polynucleotide encoding a PFN1 polypeptide, as well as the introns, exons, 3′ untranslated regions, 5′ untranslated regions, and regulatory sequences associated with its expression, or fragments thereof. In embodiments, a PFN1 polynucleotide is the genomic sequence, cDNA, mRNA, or gene associated with and/or required for PFN1 expression. An exemplary PFN1 nucleic acid sequence is provided below (GenBank Accession No. BC002475.2:123-545).

>BC002475.2:123-545 Homo sapiens Profilin 1, mRNA (cDNA Clone MGC:2264 IMAGE:3349355), Complete Cds
ATGGCCGGGTGGAACGCCTACATCGACAACCTCATGGCGGACGGGACCTGTCAGGACGCGGC CATCGTGGGCTACAAGGACTCGCCCTCCGTCTGGGCCGCCGTCCCCGGGAAAACGTTCGTCA ACATCACGCCAGCTGAGGTGGGTGTCCTGGTTGGCAAAGACCGGTCAAGTTTTTACGTGAAT GGGCTGACACTTGGGGGCCAGAAATGTTCGGTGATCCGGGACTCACTGCTGCAGGATGGGGA ATTTAGCATGGATCTTCGTACCAAGAGCACCGGTGGGGCCCCCACCTTCAATGTCACTGTCA CCAAGACTGACAAGACGCTAGTCCTGCTGATGGGCAAAGAAGGTGTCCACGGTGGTTTGATC AACAAGAAATGTTATGAAATGGCCTCCCACCTTCGGCGTTCCCAGTACTGA (SEQ ID NO: 632). An exemplary PFN1 gene sequence is provided at ENSEMBL Accession No. ENSG00000108518 (SEQ ID NO: 633).

[0093] By “PR domain-containing protein 1 (PRDM1) polypeptide” is meant a protein having at least about 85% amino acid sequence identity to GenBank Accession No. AAO45623.1, which is provided below, or a fragment thereof having immunomodulatory activity.

>AAO45623.1 PR domain-containing protein 1 alpha
[Homo sapiens]
(SEQ ID NO: 634)
MKMDMEDADMTLWTEAEFEEKCTYIVNDHPWDSGADGGTSVQAEA
SLPRNLLFKYATNSEEVIGVMSKEYIPKGTRFGPLIGEIYTNDTV
PKNANRKYFWRIYSRGELHHFIDGFNEEKSNWMRYVNPAHSPREQ
NLAACQNGMNIYFYTIKPIPANQELLVWYCRDFAERLHYPYPGEL
TMMNLTQTQSSLKQPSTEKNELCPKNVPKREYSVKEILKLDSNPS
KGKDLYRSNISPLTSEKDLDDFRRRGSPEMPFYPRVVYPIRAPLP
EDFLKASLAYGIERPTYITRSPIPSSTTPSPSARSSPDQSLKSSS
PHSSPGNTVSPVGPGSQEHRDSYAYLNASYGTEGLGSYPGYAPLP
HLPPAFIPSYNAHYPKFLLPPYGMNCNGLSAVSSMNGINNFGLFP
RLCPVYSNLLGGGSLPHPMLNPTSLPSSLPSDGARRLLQPEHPRE
VLVPAPHSAFSFTGAAASMKDKACSPTSGSPTAGTAATAEHVVQP
KATSAAMAAPSSDEAMNLIKNKRNMTGYKTLPYPLKKQNGKIKYE
CNVCAKTFGQLSNLKVHLRVHSGERPFKCQTCNKGFTQLAHLQKH
YLVHTGEKPHECQVCHKRFSSTSNLKTHLRLHSGEKPYQCKVCPA
KFTQFVHLKLHKRLHTRERPHKCSQCHKNYIHLCSLKVHLKGNCA
AAPAPGLPLEDLTRINEEIEKFDISDNADRLEDVEDDISVISVVE
KEILAVVRKEKEETGLKVSLQRNMGNGLLSSGCSLYESSDLPLMK
LPPSNPLPLVPVKVKQETVEPMDP.

[0094] By “PR domain-containing protein 1 (PRDM1) polynucleotide” is meant a polynucleotide encoding a PRDM1 polypeptide, as well as the introns, exons, 3′ untranslated regions, 5′ untranslated regions, and regulatory sequences associated with its expression, or fragments thereof. In embodiments, a PRDM1 polynucleotide is the genomic sequence, cDNA, mRNA, or gene associated with and/or required for PRDM1 expression. An exemplary PRDM1 nucleic acid sequence is provided below (GenBank Accession No. AY198414.1:343-2712).

>AY198414.1:343-2712 Homo sapiens PR Domain-Containing Protein 1 Alpha (PRDM1) mRNA, Complete Cds
ATGAAAATGGACATGGAGGATGCGGATATGACTCTGTGGACAGAGGCTGAGTTTGAAGAGAA GTGTACATACATTGTGAACGACCACCCCTGGGATTCTGGTGCTGATGGCGGTACTTCGGTTC AGGCGGAGGCATCCTTACCAAGGAATCTGCTTTTCAAGTATGCCACCAACAGTGAAGAGGTT ATTGGAGTGATGAGTAAAGAATACATACCAAAGGGCACACGTTTTGGACCCCTAATAGGTGA AATCTACACCAATGACACAGTTCCTAAGAACGCCAACAGGAAATATTTTTGGAGGATCTATT CCAGAGGGGAGCTTCACCACTTCATTGACGGCTTTAATGAAGAGAAAAGCAACTGGATGCGC TATGTGAATCCAGCACACTCTCCCCGGGAGCAAAACCTGGCTGCGTGTCAGAACGGGATGAA CATCTACTTCTACACCATTAAGCCCATCCCTGCCAACCAGGAACTTCTTGTGTGGTATTGTC GGGACTTTGCAGAAAGGCTTCACTACCCTTATCCCGGAGAGCTGACAATGATGAATCTCACA CAAACACAGAGCAGTCTAAAGCAACCGAGCACTGAGAAAAATGAACTCTGCCCAAAGAATGT CCCAAAGAGAGAGTACAGCGTGAAAGAAATCCTAAAATTGGACTCCAACCCCTCCAAAGGAA AGGACCTCTACCGTTCTAACATTTCACCCCTCACATCAGAAAAGGACCTCGATGACTTTAGA AGACGTGGGAGCCCCGAAATGCCCTTCTACCCTCGGGTCGTTTACCCCATCCGGGCCCCTCT GCCAGAAGACTTTTTGAAAGCTTCCCTGGCCTACGGGATCGAGAGACCCACGTACATCACTC GCTCCCCCATTCCATCCTCCACCACTCCAAGCCCCTCTGCAAGAAGCAGCCCCGACCAAAGC CTCAAGAGCTCCAGCCCTCACAGCAGCCCTGGGAATACGGTGTCCCCTGTGGGCCCCGGCTC TCAAGAGCACCGGGACTCCTACGCTTACTTGAACGCGTCCTACGGCACGGAAGGTTTGGGCT CCTACCCTGGCTACGCACCCCTGCCCCACCTCCCGCCAGCTTTCATCCCCTCGTACAACGCT CACTACCCCAAGTTCCTCTTGCCCCCCTACGGCATGAATTGTAATGGCCTGAGCGCTGTGAG CAGCATGAATGGCATCAACAACTTTGGCCTCTTCCCGAGGCTGTGCCCTGTCTACAGCAATC TCCTCGGTGGGGGCAGCCTGCCCCACCCCATGCTCAACCCCACTTCTCTCCCGAGCTCGCTG CCCTCAGATGGAGCCCGGAGGTTGCTCCAGCCGGAGCATCCCAGGGAGGTGCTTGTCCCGGC GCCCCACAGTGCCTTCTCCTTTACCGGGGCCGCCGCCAGCATGAAGGACAAGGCCTGTAGCC CCACAAGCGGGTCTCCCACGGCGGGAACAGCCGCCACGGCAGAACATGTGGTGCAGCCCAAA GCTACCTCAGCAGCGATGGCAGCCCCCAGCAGCGACGAAGCCATGAATCTCATTAAAAACAA AAGAAACATGACCGGCTACAAGACCCTTCCCTACCCGCTGAAGAAGCAGAACGGCAAGATCA AGTACGAATGCAACGTTTGCGCCAAGACTTTCGGCCAGCTCTCCAATCTGAAGGTCCACCTG AGAGTGCACAGTGGAGAACGGCCTTTCAAATGTCAGACTTGCAACAAGGGCTTTACTCAGCT CGCCCACCTGCAGAAACACTACCTGGTACACACGGGAGAAAAGCCACATGAATGCCAGGTCT GCCACAAGAGATTTAGCAGCACCAGCAATCTCAAGACCCACCTGCGACTCCATTCTGGAGAG AAACCATACCAATGCAAGGTGTGCCCTGCCAAGTTCACCCAGTTTGTGCACCTGAAACTGCA CAAGCGTCTGCACACCCGGGAGCGGCCCCACAAGTGCTCCCAGTGCCACAAGAACTACATCC ATCTCTGTAGCCTCAAGGTTCACCTGAAAGGGAACTGCGCTGCGGCCCCGGCGCCTGGGCTG CCCTTGGAAGATCTGACCCGAATCAATGAAGAAATCGAGAAGTTTGACATCAGTGACAATGC TGACCGGCTCGAGGACGTGGAGGATGACATCAGTGTGATCTCTGTAGTGGAGAAGGAAATTC TGGCCGTGGTCAGAAAAGAGAAAGAAGAAACTGGCCTGAAAGTGTCTTTGCAAAGAAACATG GGGAATGGACTCCTCTCCTCAGGGTGCAGCCTTTATGAGTCATCAGATCTACCCCTCATGAA GTTGCCTCCCAGCAACCCACTACCTCTGGTACCTGTAAAGGTCAAACAAGAAACAGTTGAAC CAATGGATCCTTAA (SEQ ID NO: 635). An exemplary PRDM1 gene sequence is provided at ENSEMBL Accession No. ENSG00000057657 (SEQ ID NO: 636).

[0095] By “Protein kinase, cAMP-dependent, catalytic, alpha (PRKACA) polypeptide” is meant a protein having at least about 85% amino acid sequence identity to GenBank Accession No. AAH39846.1, which is provided below, or a fragment thereof having immunomodulatory activity.

>AAH39846.1 Protein kinase, cAMP-dependent,
catalytic, alpha[Homo sapiens]
(SEQ ID NO: 637)
MGNAAAAKKGSEQESVKEFLAKAKEDFLKKWESPAQNTAHLDQFE
RIKTIGTGSFGRVMLVKHKETGNHYAMKILDKQKVVKLKQIEHTL
NEKRILQAVNFPFLVKLEFSFKDNSNLYMVMEYVPGGEMFSHLRR
IGRFSEPHARFYAAQIVLTFEYLHSLDLIYRDLKPENLLIDQQGY
IQVTDFGFAKRVKGRTWTLCGTPEYLAPEIILSKGYNKAVDWWAL
GVLIYEMAAGYPPFFADQPIQIYEKIVSGKVRFPSHFSSDLKDLL
RNLLQVDLTKRFGNLKNGVNDIKNHKWFATTDWIAIYQRKVEAPF
IPKFKGPGDTSNFDDYEEEEIRVSINEKCGKEFSEF.

[0096] By “Protein kinase, cAMP-dependent, catalytic, alpha (PRKACA) polynucleotide” is meant a polynucleotide encoding a PRKACA polypeptide, as well as the introns, exons, 3′ untranslated regions, 5′ untranslated regions, and regulatory sequences associated with its expression, or fragments thereof. In embodiments, a PRKACA polynucleotide is the genomic sequence, cDNA, mRNA, or gene associated with and/or required for PRKACA expression. An exemplary PRKACA nucleic acid sequence is provided below (GenBank Accession No. BC039846.1:197-1252).

>BC039846.1:197-1252 Homo sapiens Protein Kinase, cAMP-Dependent, Catalytic, Alpha, mRNA (cDNA Clone MGC:48865 IMAGE:6066764), Complete Cds
ATGGGCAACGCCGCCGCCGCCAAGAAGGGCAGCGAGCAGGAGAGCGTGAAAGAATTCTTAGC CAAAGCCAAAGAAGATTTTCTTAAAAAATGGGAAAGTCCCGCTCAGAACACAGCCCACTTGG ATCAGTTTGAACGAATCAAGACCCTCGGCACGGGCTCCTTCGGGCGGGTGATGCTGGTGAAA CACAAGGAGACCGGGAACCACTATGCCATGAAGATCCTCGACAAACAGAAGGTGGTGAAACT GAAACAGATCGAACACACCCTGAATGAAAAGCGCATCCTGCAAGCTGTCAACTTTCCGTTCC TCGTCAAACTCGAGTTCTCCTTCAAGGACAACTCAAACTTATACATGGTCATGGAGTACGTG CCCGGCGGGGAGATGTTCTCACACCTACGGCGGATCGGAAGGTTCAGTGAGCCCCATGCCCG TTTCTACGCGGCCCAGATCGTCCTGACCTTTGAGTATCTGCACTCGCTGGATCTCATCTACA GGGACCTGAAGCCGGAGAATCTGCTCATTGACCAGCAGGGCTACATTCAGGTGACAGACTTC GGTTTCGCCAAGCGCGTGAAGGGCCGCACTTGGACCTTGTGCGGCACCCCTGAGTACCTGGC CCCTGAGATTATCCTGAGCAAAGGCTACAACAAGGCCGTGGACTGGTGGGCCCTGGGGGTTC TTATCTATGAAATGGCCGCTGGCTACCCGCCCTTCTTCGCAGACCAGCCCATCCAGATCTAT GAGAAGATCGTCTCTGGGAAGGTGCGCTTCCCTTCCCACTTCAGCTCTGACTTGAAGGACCT GCTGCGGAACCTCCTGCAGGTAGATCTCACCAAGCGCTTTGGGAACCTCAAGAATGGGGTCA ACGATATCAAGAACCACAAGTGGTTTGCCACAACTGACTGGATTGCCATCTACCAGAGGAAG GTGGAAGCTCCCTTCATACCAAAGTTTAAAGGCCCTGGGGATACGAGTAACTTTGACGACTA TGAGGAAGAAGAAATCCGGGTCTCCATCAATGAGAAGTGTGGCAAGGAGTTTTCTGAGTTTT AG (SEQ ID NO: 638). An exemplary PRKACA gene sequence is provided at ENSEMBL Accession No. ENSG00000072062 (SEQ ID NO: 639).

[0097] By “Protein tyrosine phosphatase, nonreceptor-type, 1B (PTP1B) polypeptide” is meant a protein having at least about 85% amino acid sequence identity to GenBank Accession No. AAA60157.1, which is provided below, or a fragment thereof having immunomodulatory activity.

>AAA60157.1 non-receptor tyrosine phosphatase 1
[Homo sapiens]
(SEQ ID NO: 640)
MEMEKEFEQIDKSGSWAAIYQDIRHEASDFPCRVAKLPKNKNRNR
YRDVSPFDHSRIKLHQEDNDYINASLIKMEEAQRSYILTQGPLPN
TCGHFWEMVWEQKSRGVVMLNRVMEKGSLKCAQYWPQKEEKEMIF
EDTNLKLTLISEDIKSYYTVRQLELENLTTQETREILHFHYTTWP
DFGVPESPASFLNFLFKVRESGSLSPEHGPVVVHCSAGIGRSGTF
CLADTCLLLMDKRKDPSSVDIKKVLLEMRKFRMGLIQTADQLRFS
YLAVIEGAKFIMGDSSVQDQWKELSHEDLEPPPEHIPPPPRPPKR
ILEPHNGKCREFFPNHQWVKEETQEDKDCPIKEEKGSPLNAAPYG
IESMSQDTEVRSRVVGGSLRGAQAASPAKGEPSLPEKDEDHALSY
WKPFLVNMCVATVLTAGAYLCYRFLENSNT.

[0098] By “Protein tyrosine phosphatase, nonreceptor-type, 1B (PTP1B) polynucleotide” is meant a polynucleotide encoding a PTP1B polypeptide, as well as the introns, exons, 3′ untranslated regions, 5′ untranslated regions, and regulatory sequences associated with its expression, or fragments thereof. In embodiments, a PTP1B polynucleotide is the genomic sequence, cDNA, mRNA, or gene associated with and/or required for PTP1B expression. An exemplary PTP1B nucleic acid sequence is provided below (GenBank Accession No. M33689.1:73-1380).

>M33689.1:73-1380 Human (Clone Lambda-16-1) Non-Receptor Tyrosine Phosphatase 1 (PTPN1) mRNA, Complete Cds
ATGGAGATGGAAAAGGAGTTCGAGCAGATCGACAAGTCCGGGAGCTGGGCGGCCATTTACCA GGATATCCGACATGAAGCCAGTGACTTCCCATGTAGAGTGGCCAAGCTTCCTAAGAACAAAA ACCGAAATAGGTACAGAGACGTCAGTCCCTTTGACCATAGTCGGATTAAACTACATCAAGAA GATAATGACTATATCAACGCTAGTTTGATAAAAATGGAAGAAGCCCAAAGGAGTTACATTCT TACCCAGGGCCCTTTGCCTAACACATGCGGTCACTTTTGGGAGATGGTGTGGGAGCAGAAAA GCAGGGGTGTCGTCATGCTCAACAGAGTGATGGAGAAAGGTTCGTTAAAATGCGCACAATAC TGGCCACAAAAAGAAGAAAAAGAGATGATCTTTGAAGACACAAATTTGAAATTAACATTGAT CTCTGAAGATATCAAGTCATATTATACAGTGCGACAGCTAGAATTGGAAAACCTTACAACCC AAGAAACTCGAGAGATCTTACATTTCCACTATACCACATGGCCTGACTTTGGAGTCCCTGAA TCACCAGCCTCATTCTTGAACTTTCTTTTCAAAGTCCGAGAGTCAGGGTCACTCAGCCCGGA GCACGGGCCCGTTGTGGTGCACTGCAGTGCAGGCATCGGCAGGTCTGGAACCTTCTGTCTGG CTGATACCTGCCTCTTGCTGATGGACAAGAGGAAAGACCCTTCTTCCGTTGATATCAAGAAA GTGCTGTTAGAAATGAGGAAGTTTCGGATGGGGCTGATCCAGACAGCCGACCAGCTGCGCTT CTCCTACCTGGCTGTGATCGAAGGTGCCAAATTCATCATGGGGGACTCTTCCGTGCAGGATC AGTGGAAGGAGCTTTCCCACGAGGACCTGGAGCCCCCACCCGAGCATATCCCCCCACCTCCC CGGCCACCCAAACGAATCCTGGAGCCACACAATGGGAAATGCAGGGAGTTCTTCCCAAATCA CCAGTGGGTGAAGGAAGAGACCCAGGAGGATAAAGACTGCCCCATCAAGGAAGAAAAAGGAA GCCCCTTAAATGCCGCACCCTACGGCATCGAAAGCATGAGTCAAGACACTGAAGTTAGAAGT CGGGTCGTGGGGGGAAGTCTTCGAGGTGCCCAGGCTGCCTCCCCAGCCAAAGGGGAGCCGTC ACTGCCCGAGAAGGACGAGGACCATGCACTGAGTTACTGGAAGCCCTTCCTGGTCAACATGT GCGTGGCTACGGTCCTCACGGCCGGCGCTTACCTCTGCTACAGGTTCCTGTTCAACAGCAAC ACATAG (SEQ ID NO: 641). An exemplary PTP1B gene sequence is provided at ENSEMBL Accession No. ENSG00000196396 (SEQ ID NO: 642).

[0099] By “Protein-tyrosine phosphatase, nonreceptor-type 6, (PTPN6) polypeptide” is meant a protein having at least about 85% amino acid sequence identity to GenBank Accession No. AAH02523.1, which is provided below, or a fragment thereof having immunomodulatory activity.

>AAH02523.1 Protein tyrosine phosphatase,
non-receptor type 6 [Homo sapiens]
(SEQ ID NO: 643)
MLSRGWFHRDLSGLDAETLLKGRGVHGSFLARPSRKNQGDFSLSV
RVGDQVTHIRIQNSGDFYDLYGGEKFATLTELVEYYTQQQGVLQD
RDGTIIHLKYPLNCSDPTSERWYHGHMSGGQAETLLQAKGEPWTF
LVRESLSQPGDFVLSVLSDQPKAGPGSPLRVTHIKVMCEGGRYTV
GGLETFDSLTDLVEHFKKTGIEEASGAFVYLRQPYYATRVNAADI
ENRVLELNKKQESEDTAKAGFWEEFESLQKQEVKNLHQRLEGQRP
ENKGKNRYKNILPFDHSRVILQGRDSNIPGSDYINANYIKNQLLG
PDENAKTYIASQGCLEATVNDFWQMAWQENSRVIVMTTREVEKGR
NKCVPYWPEVGMQRAYGPYSVTNCGEHDTTEYKLRTLQVSPLDNG
DLIREIWHYQYLSWPDHGVPSEPGGVLSFLDQINQRQESLPHAGP
IIVHCSAGIGRTGTIIVIDMLMENISTKGLDCDIDIQKTIQMVRA
QRSGMVQTEAQYKFIYVAIAQFIETTKKKLEVLQSQKGQESEYGN
ITYPPAMKNAHAKASRTSSKHKEDVYENLHTKNKREEKVKKQRSA
DKEKSKGSLKRK.

[0100] By “Protein-tyrosine phosphatase, nonreceptor-type 6, (PTPN6) polynucleotide” is meant a polynucleotide encoding a PTPN6 polypeptide, as well as the introns, exons, 3′ untranslated regions, 5′ untranslated regions, and regulatory sequences associated with its expression, or fragments thereof. In embodiments, a PTPN6 polynucleotide is the genomic sequence, cDNA, mRNA, or gene associated with and/or required for PTPN6 expression. An exemplary PTPN6 nucleic acid sequence is provided below (GenBank Accession No. BC002523.2:136-1929).

>BC002523.2:136-1929 Homo sapiens Protein Tyrosine Phosphatase, Non-Receptor Type 6, mRNA (cDNA Clone MGC:2332 IMAGE:3140265), Complete Cds
ATGCTGTCCCGTGGGTGGTTTCACCGAGACCTCAGTGGGCTGGATGCAGAGACCCTGCTCAA GGGCCGAGGTGTCCACGGTAGCTTCCTGGCTCGGCCCAGTCGCAAGAACCAGGGTGACTTCT CGCTCTCCGTCAGGGTGGGGGATCAGGTGACCCATATTCGGATCCAGAACTCAGGGGATTTC TATGACCTGTATGGAGGGGAGAAGTTTGCGACTCTGACAGAGCTGGTGGAGTACTACACTCA GCAGCAGGGTGTCCTGCAGGACCGCGACGGCACCATCATCCACCTCAAGTACCCGCTGAACT GCTCCGATCCCACTAGTGAGAGGTGGTACCATGGCCACATGTCTGGCGGGCAGGCAGAGACG CTGCTGCAGGCCAAGGGCGAGCCCTGGACGTTTCTTGTGCGTGAGAGCCTCAGCCAGCCTGG AGACTTCGTGCTTTCTGTGCTCAGTGACCAGCCCAAGGCTGGCCCAGGCTCCCCGCTCAGGG TCACCCACATCAAGGTCATGTGCGAGGGTGGACGCTACACAGTGGGTGGTTTGGAGACCTTC GACAGCCTCACGGACCTGGTGGAGCATTTCAAGAAGACGGGGATTGAGGAGGCCTCAGGCGC CTTTGTCTACCTGCGGCAGCCGTACTATGCCACGAGGGTGAATGCGGCTGACATTGAGAACC GAGTGTTGGAACTGAACAAGAAGCAGGAGTCCGAGGATACAGCCAAGGCTGGCTTCTGGGAG GAGTTTGAGAGTTTGCAGAAGCAGGAGGTGAAGAACTTGCACCAGCGTCTGGAAGGGCAGCG GCCAGAGAACAAGGGCAAGAACCGCTACAAGAACATTCTCCCCTTTGACCACAGCCGAGTGA TCCTGCAGGGACGGGACAGTAACATCCCCGGGTCCGACTACATCAATGCCAACTACATCAAG AACCAGCTGCTAGGCCCTGATGAGAACGCTAAGACCTACATCGCCAGCCAGGGCTGTCTGGA GGCCACGGTCAATGACTTCTGGCAGATGGCGTGGCAGGAGAACAGCCGTGTCATCGTCATGA CCACCCGAGAGGTGGAGAAAGGCCGGAACAAATGCGTCCCATACTGGCCCGAGGTGGGCATG CAGCGTGCTTATGGGCCCTACTCTGTGACCAACTGCGGGGAGCATGACACAACCGAATACAA ACTCCGTACCTTACAGGTCTCCCCGCTGGACAATGGAGACCTGATTCGGGAGATCTGGCATT ACCAGTACCTGAGCTGGCCCGACCATGGGGTCCCCAGTGAGCCTGGGGGTGTCCTCAGCTTC CTGGACCAGATCAACCAGCGGCAGGAAAGTCTGCCTCACGCAGGGCCCATCATCGTGCACTG CAGCGCCGGCATCGGCCGCACAGGCACCATCATTGTCATCGACATGCTCATGGAGAACATCT CCACCAAGGGCCTGGACTGTGACATTGACATCCAGAAGACCATCCAGATGGTGCGGGCGCAG CGCTCGGGCATGGTGCAGACGGAGGCGCAGTACAAGTTCATCTACGTGGCCATCGCCCAGTT CATTGAAACCACTAAGAAGAAGCTGGAGGTCCTGCAGTCGCAGAAGGGCCAGGAGTCGGAGT ACGGGAACATCACCTATCCCCCAGCCATGAAGAATGCCCATGCCAAGGCCTCCCGCACCTCG TCCAAACACAAGGAGGATGTGTATGAGAACCTGCACACTAAGAACAAGAGGGAGGAGAAAGT GAAGAAGCAGCGGTCAGCAGACAAGGAGAAGAGCAAGGGTTCCCTCAAGAGGAAGTGA (SEQ ID NO: 644). An exemplary PTPN6 gene sequence is provided at ENSEMBL Accession No. ENSG00000111679 (SEQ ID NO: 645).

[0101] By “RAS p21 protein activator 2 (RASA2) polypeptide” is meant a protein having at least about 85% amino acid sequence identity to GenBank Accession No. EAW78998.1, which is provided below, or a fragment thereof having immunomodulatory activity.

>EAW78998.1 RAS p21 protein activator 2,
isoform CRA_a[Homo sapiens]
(SEQ ID NO: 646)
MAAAAPAAAAASSEAPAASATAEPEAGDQDSREVRVLQSLRGKIC
EAKNLLPYLGPHKMRDCFCTINLDQEEVYRTQVVEKSLSPFFSEE
FYFEIPRTFQYLSFYVYDKNVLQRDLRIGKVAIKKEDLCNHSGKE
TWFSLQPVDSNSEVQGKVHLELKLNELITENGTVCQQLVVHIKAC
HGLPLINGQSCDPYATVSLVGPSRNDQKKTKVKKKTSNPQFNEIF
YFEVTRSSSYTRKSQFQVEEEDIEKLEIRIDLWNNGNLVQDVFLG
EIKVPVNVLRTDSSHQAWYLLQPRDNGNKSSKTDDLGSLRLNICY
TEDYVLPSEYYGPLKTLLLKSPDVQPISASAAYILSEICRDKNDA
VLPLVRLLLHHDKLVPFATAVAELDLKDTQDANTIFRGNSLATRC
LDEMMKIVGGHYLKVTLKPILDEICDSSKSCEIDPIKLKEGDNVE
NNKENLRYYVDKLFNTIVKSSMSCPTVMCDIFYSLRQMATQRFPN
DPHVQYSAVSSFVFLRFFAVAVVSPHTFHLRPHHPDAQTIRTLTL
ISKTIQTLGSWGSLSKSKSSFKETFMCEFFKMFQEEGYIIAVKKF
LDEISSTETKESSGTSEPVHLKEGEMYKRAQGRTRIGKKNFKKRW
FCLTSRELTYHKQPGKDAIYTIPVKNILAVEKLEESSFNKKNMFQ
VIHTEKPLYVQANNCVEANEWIDVLCRVSRCNQNRLSFYHPSVYL
NGNWLCCQETGENTLGCKPCTAGVPADIQIDIDEDRETERIYSLF
TLSLLKLQKMEEACGTIAVYQGPQKEPDDYSNFVIEDSVTTFKTI
QQIKSIIEKLDEPHEKYRKKRSSSAKYGSKENPIVGKAS.

[0102] By “RAS p21 protein activator 2 (RASA2) polynucleotide” is meant a polynucleotide encoding a RASA2 polypeptide, as well as the introns, exons, 3′ untranslated regions, 5′ untranslated regions, and regulatory sequences associated with its expression, or fragments thereof. In embodiments, a RASA2 polynucleotide is the genomic sequence, cDNA, mRNA, or gene associated with and/or required for RASA2 expression. An exemplary RASA2 nucleic acid sequence is provided below (GenBank Accession No. CH471052.2:47815149-47815281,47840228-47840345,47844394-47844497,47857775-47857869,47868600-47868676,47881926-47882009,47883909-47883981,47886955-47887031,47887963-47888064,47898869-47899025,47899363-47899511,47900568-47900682,47901106-47901180,47901903-47902026,47904959-47905065,47908327-47908410,47909059-47909136,47913984-47914057,47914605-47914711,47935981-47936063,47936792-47937000,47937723-47937826,47938180-47938369,47940547-47940577).

>CH471052.2:47815149-47815281,47840228-47840345,47844394-47844497,47857775-47857869,47868600-47868676,47881926-47882009,47883909-47883981,47886955-47887031,47887963-47888064,47898869-47899025,47899363-47899511,47900568-47900682,47901106-47901180,47901903-47902026,47904959-47905065,47908327-47908410,47909059-47909136,47913984-47914057,47914605-47914711,47935981-47936063,47936792-47937000,47937723-47937826,47938180-47938369,47940547-47940577 Homo sapiens 211000035835664 Genomic Scaffold, Whole Genome Shotgun Sequence
ATGGCGGCGGCGGCGCCTGCTGCTGCGGCGGCTTCTTCCGAGGCGCCAGCGGCGAGTGCGAC TGCAGAGCCCGAGGCCGGGGACCAGGACAGTCGCGAGGTTCGAGTGTTGCAGAGCCTGCGGG GCAAGATCTGTGAAGCAAAAAATTTATTGCCATATCTTGGACCCCACAAAATGAGAGATTGT TTCTGTACCATAAATTTGGACCAGGAAGAAGTTTATCGTACCCAAGTTGTGGAAAAATCTTT AAGCCCATTTTTCAGTGAAGAATTTTACTTTGAGATTCCAAGAACTTTCCAGTATTTGTCTT TCTATGTTTATGATAAGAATGTTTTACAAAGAGATCTCCGTATAGGAAAAGTAGCCATCAAA AAAGAAGACTTGTGTAATCACAGTGGCAAAGAAACTTGGTTTTCATTACAGCCTGTTGACTC CAATTCAGAGGTTCAGGGTAAAGTTCACCTTGAATTAAAACTGAATGAACTGATAACGGAGA ATGGAACTGTATGCCAGCAGCTTGTTGTACACATCAAGGCATGCCATGGGTTGCCTCTCATA AATGGCCAAAGCTGTGACCCTTATGCAACAGTTTCTCTAGTGGGCCCTTCTAGGAATGACCA AAAGAAGACAAAAGTAAAGAAGAAAACAAGCAATCCGCAGTTTAATGAAATCTTTTATTTTG AGGTAACCAGATCCAGTAGTTACACCAGAAAGTCCCAGTTCCAGGTAGAAGAGGAGGACATT GAAAAGCTAGAAATCAGGATCGACTTGTGGAACAATGGAAACCTAGTCCAAGATGTTTTCCT AGGTGAGATTAAGGTTCCTGTGAACGTATTAAGAACTGATTCCTCTCATCAAGCCTGGTACT TGCTACAGCCAAGAGACAATGGAAACAAGTCATCCAAAACTGATGACCTGGGGTCTCTTCGA TTAAATATATGTTATACAGAAGACTACGTGCTTCCTTCAGAGTACTATGGTCCTTTGAAAAC TTTGCTGCTAAAATCACCAGATGTTCAACCAATATCTGCCTCAGCTGCTTACATTTTGAGTG AAATATGTCGAGATAAAAATGATGCTGTTTTGCCCCTTGTACGACTGCTGCTGCACCATGAT AAACTTGTTCCTTTTGCCACTGCTGTGGCTGAATTAGACTTGAAGGATACACAAGATGCAAA CACAATTTTTAGAGGAAATTCCCTGGCTACCCGATGTCTGGATGAGATGATGAAAATAGTGG GAGGGCACTACCTGAAAGTAACATTAAAACCTATTCTTGATGAGATATGTGACTCCTCAAAA TCCTGTGAAATCGATCCTATTAAATTGAAAGAGGGAGATAATGTAGAAAATAATAAGGAGAA TCTGCGCTACTATGTAGACAAGTTATTCAATACAATTGTAAAATCAAGTATGAGCTGCCCCA CTGTAATGTGTGATATCTTTTATTCTCTAAGGCAGATGGCTACTCAGAGATTTCCTAATGAC CCTCATGTTCAGTATTCTGCAGTGAGCAGCTTTGTATTTCTTCGTTTCTTTGCTGTAGCCGT AGTATCACCTCATACTTTTCATTTGCGACCTCATCATCCAGATGCACAGACAATTAGAACAT TAACTCTCATCTCAAAAACTATACAAACTTTGGGAAGCTGGGGGAGTCTGTCCAAAAGCAAG TCAAGTTTCAAAGAGACATTCATGTGTGAATTTTTCAAAATGTTTCAAGAAGAAGGATATAT TATAGCAGTTAAAAAGTTCTTGGATGAAATTTCATCTACTGAAACTAAAGAGTCCAGTGGTA CGAGTGAGCCTGTGCACCTGAAAGAAGGTGAGATGTATAAAAGAGCTCAAGGAAGAACTCGG ATTGGAAAAAAGAATTTTAAGAAACGATGGTTCTGCTTAACAAGCAGAGAGCTCACCTACCA CAAACAGCCAGGCAAAGATGCAATCTACACAATCCCAGTAAAAAACATTCTTGCTGTGGAAA AACTGGAAGAGAGCTCTTTCAACAAGAAAAATATGTTCCAAGTAATACATACGGAGAAACCA CTCTATGTCCAGGCAAATAACTGTGTAGAAGCTAATGAATGGATAGACGTACTCTGCAGGGT GAGCCGATGCAATCAAAACAGGCTCAGTTTTTATCATCCCTCTGTGTATCTAAACGGAAATT GGCTCTGCTGTCAGGAGACTGGTGAAAACACTCTCGGCTGCAAGCCATGTACTGCAGGTGTC CCTGCAGACATCCAAATAGATATTGATGAAGACAGAGAAACAGAAAGAATTTATTCCCTTTT TACCCTCAGTTTACTTAAGCTGCAGAAGATGGAAGAGGCTTGTGGAACTATTGCAGTCTATC AAGGACCACAGAAAGAGCCTGATGATTATTCTAACTTTGTAATCGAGGATTCTGTAACAACC TTTAAGACAATTCAGCAAATAAAAAGCATAATTGAGAAGCTGGATGAACCTCATGAAAAATA TAGGAAGAAAAGATCCAGTAGTGCAAAATATGGGAGCAAGGAAAATCCAATTGTTGGGAAAG CATCTTAG (SEQ ID NO: 647). An exemplary RASA2 gene sequence is provided at ENSEMBL Accession No. ENSG00000155903 (SEQ ID NO: 648).

[0103] By “Zinc finger CCCH domain-containing protein 12A (Regnase-1) polypeptide” is meant a protein having at least about 85% amino acid sequence identity to GenBank Accession No. AAH05001.1, which is provided below, or a fragment thereof having immunomodulatory activity.

>AAH05001.1 Zinc finger CCCH-type containing
12A [Homo sapiens]
(SEQ ID NO: 649)
MSGPCGEKPVLEASPTMSLWEFEDSHSRQGTPRPGQELAAEEASA
LELQMKVDFFRKLGYSSTEIHSVLQKLGVQADTNTVLGELVKHGT
ATERERQTSPDPCPQLPLVPRGGGTPKAPNLEPPLPEEEKEGSDL
RPVVIDGSNVAMSHGNKEVFSCRGILLAVNWFLERGHTDITVFVP
SWRKEQPRPDVPITDQHILRELEKKKILVFTPSRRVGGKRVVCYD
DRFIVKLAYESDGIVVSNDTYRDLQGERQEWKRFIEERLLMYSFV
NDKFMPPDDPLGRHGPSLDNFLRKKPLTLEHRKQPCPYGRKCTYG
IKCRFFHPERPSCPQRSVADELRANALLSPPRAPSKDKNGRRPSP
SSQSSSLLTESEQCSLDGKKLGAQASPGSRQEGLTQTYAPSGRSL
APSGGSGSSFGPTDWLPQTLDSLPYVSQDCLDSGIGSLESQMSEL
WGVRGGGPGEPGPPRAPYTGYSPYGSELPATAAFSAFGRAMGAGH
FSVPADYPPAPPAFPPREYWSEPYPLPPPTSVLQEPPVQSPGAGR
SPWGRADSLAKEQASVYTKLCGVFPPHLVEAVMGRFPQLLDPQQL
AAEILSYKSQHPSE.

[0104] By “Zinc finger CCCH domain-containing protein 12A (Regnase-1) polynucleotide” is meant a polynucleotide encoding a Regnase-1 polypeptide, as well as the introns, exons, 3′ untranslated regions, 5′ untranslated regions, and regulatory sequences associated with its expression, or fragments thereof. In embodiments, a Regnase-1 polynucleotide is the genomic sequence, cDNA, mRNA, or gene associated with and/or required for Regnase-1 expression. An exemplary Regnase-1 nucleic acid sequence is provided below (GenBank Accession No. BC0005001.1:75-1874).

>BC0005001.1:75-1874 Homo sapiens Zinc Finger CCCH-Type Containing 12A, mRNA (cDNA Clone MGC:4427 IMAGE:2958199), Complete Cds
ATGAGTGGCCCCTGTGGAGAGAAGCCTGTCCTGGAAGCCAGCCCCACCATGAGTCTGTGGGA ATTTGAGGACAGCCACAGCCGTCAGGGCACCCCAAGGCCGGGTCAAGAGCTGGCCGCTGAGG AGGCCTCGGCCCTGGAACTGCAGATGAAGGTGGACTTCTTCCGGAAGCTGGGCTATTCATCC ACGGAGATCCACAGCGTCCTGCAGAAGCTGGGCGTCCAGGCAGACACCAACACGGTGCTGGG TGAGCTGGTGAAACACGGGACAGCCACCGAGCGGGAGCGCCAGACCTCACCGGACCCCTGCC CTCAGCTCCCTCTAGTCCCGCGGGGTGGTGGCACCCCTAAGGCTCCCAACCTGGAGCCTCCA CTCCCAGAAGAGGAAAAGGAGGGCAGCGACCTGAGACCAGTGGTCATCGATGGGAGCAACGT GGCCATGAGCCATGGGAACAAGGAGGTCTTCTCCTGCCGGGGCATCCTGCTGGCAGTGAACT GGTTTCTGGAGCGGGGCCACACAGACATCACAGTGTTTGTGCCATCCTGGAGGAAGGAGCAG CCTCGGCCCGACGTGCCCATCACAGACCAGCACATCCTGCGGGAACTGGAGAAGAAGAAGAT CCTGGTGTTCACACCATCACGACGCGTGGGTGGCAAGCGGGTGGTGTGCTATGACGACAGAT TCATTGTGAAGCTGGCCTACGAGTCTGACGGGATCGTGGTTTCCAACGACACATACCGTGAC CTCCAAGGCGAGCGGCAGGAGTGGAAGCGCTTCATCGAGGAGCGGCTGCTCATGTACTCCTT CGTCAATGACAAGTTTATGCCCCCTGATGACCCACTGGGCCGGCACGGGCCCAGCCTGGACA ACTTCCTGCGTAAGAAGCCACTCACTTTGGAGCACAGGAAGCAGCCGTGTCCCTATGGAAGG AAATGCACCTATGGGATCAAGTGCCGATTCTTCCACCCAGAGCGGCCAAGCTGCCCCCAGCG CTCTGTGGCAGATGAGCTCCGTGCCAATGCTCTCCTCTCACCCCCCAGAGCCCCAAGCAAGG ACAAAAATGGCCGGCGGCCTTCACCTTCATCCCAGTCCAGCTCTCTGCTAACAGAGAGTGAG CAGTGCAGCCTGGATGGGAAGAAGCTGGGGGCCCAGGCATCCCCAGGGTCCCGCCAAGAGGG TCTAACACAGACCTATGCCCCATCAGGCAGGAGCCTCGCACCTAGCGGGGGCAGTGGCAGCA GCTTTGGGCCCACAGACTGGCTCCCACAGACGCTGGACTCACTCCCGTACGTCTCCCAGGAT TGCCTGGACTCGGGCATTGGCTCCCTGGAGAGCCAGATGTCGGAACTTTGGGGGGTTCGAGG AGGAGGCCCTGGTGAGCCGGGCCCACCCCGAGCCCCTTACACGGGCTACAGTCCCTATGGAT CTGAGCTCCCAGCCACCGCAGCCTTCTCTGCCTTTGGCCGGGCCATGGGTGCTGGCCACTTC AGTGTCCCTGCCGACTACCCACCCGCGCCCCCTGCCTTTCCACCTCGAGAGTACTGGTCTGA ACCATACCCACTGCCCCCACCCACATCAGTCCTTCAGGAGCCCCCAGTGCAGAGCCCAGGGG CTGGCAGGAGCCCGTGGGGCAGGGCAGACAGCCTGGCCAAGGAGCAGGCCAGCGTGTATACT AAGCTGTGTGGTGTGTTTCCCCCGCACCTGGTGGAGGCTGTGATGGGGCGCTTCCCACAGCT CCTGGACCCCCAGCAGCTGGCTGCCGAGATCCTCTCCTACAAGTCCCAGCACCCCAGTGAGT AA (SEQ ID NO: 650). An exemplary Regnase-1 gene sequence is provided at ENSEMBL Accession No. ENSG00000163874 (SEQ ID NO: 651).

[0105] By “Ring finger and CCCH-type zinc finger domains-containing 1(Roquin-1) polypeptide” is meant a protein having at least about 85% amino acid sequence identity to NCBI Reference Sequence: NP_001287779.1, which is provided below, or a fragment thereof having immunomodulatory activity.

>NP_001287779.1 roquin-1 isoform a
[Homo sapiens]
(SEQ ID NO: 652)
MPVQAPQWTDFLSCPICTQTFDETIRKPISLGCGHTVCKMCLNKL
HRKACPFDQTTINTDIELLPVNSALLQLVGAQVPEQQPITLCSGV
EDTKHYEEAKKCVEELALYLKPLSSARGVGLNSTTQSVLSRPMQR
KLVTLVHCQLVEEEGRIRAMRAARSLGERTVTELILQHQNPQQLS
SNLWAAVRARGCQFLGPAMQEEALKLVLLALEDGSALSRKVLVLF
VVQRLEPRFPQASKTSIGHVVQLLYRASCFKVTKRDEDSSLMQLK
EEFRTYEALRREHDSQIVQIAMEAGLRIAPDQWSSLLYGDQSHKS
HMQSIIDKLQTPASFAQSVQELTIALQRTGDPANLNRLRPHLELL
ANIDPSPDAPPPTWEQLENGLVAVRTVVHGLVDYIQNHSKKGADQ
QQPPQHSKYKTYMCRDMKQRGGCPRGASCTFAHSQEELEKFRKMN
KRLVPRRPLSASLGQLNEVGLPSAAILPDEGAVDLPSRKPPALPN
GIVSTGNTVTQLIPRGTDPSYDSSLKPGKIDHLSSSAPGSPPDLL
ESVPKSISALPVNPHSIPPRGPADLPPMPVTKPLQMVPRGSQLYP
AQQTDVYYQDPRGAAPPFEPAPYQQGMYYTPPPQCVSRFVRPPPS
APEPAPPYLDHYPPYLQERVVNSQYGTQPQQYPPIYPSHYDGRRV
YPAPSYTREEIFRESPIPIEIPPAAVPSYVPESRERYQQIESYYP
VAPHPTQIRPSYLREPPYSRLPPPPQPHPSLDELHRRRKEIMAQL
EERKVISPPPFAPSPTLPPTFHPEEFLDEDLKVAGKYKGNDYSQY
SPWSCDTIGSYIGTKDAKPKDVVAAGSVEMMNVESKGMRDQRLDL
QRRAAETSDDDLIPFGDRPTVSRFGAISRTSKTIYQGAGPMQAMA
PQGAPTKSINISDYSPYGTHGGWGASPYSPHQNIPSQGHFSERER
ISMSEVASHGKPLPSAEREQLRLELQQLNHQISQQTQLRGLEAVS
NRLVLQREANTLAGQSQPPPPPPPKWPGMISSEQLSLELHQVERE
IGKRTRELSMENQCSLDMKSKLNTSKQAENGQPEPQNKVPAEDLT
LTFSSDVPNGSALTQENISLLSNKTSSLNLSEDPEGGGDNNDSQR
SGVTPSSAP.

[0106] By “Ring finger and CCCH-type zinc finger domains-containing 1(Roquin-1) polynucleotide” is meant a polynucleotide encoding a Roquin-1 polypeptide, as well as the introns, exons, 3′ untranslated regions, 5′ untranslated regions, and regulatory sequences associated with its expression, or fragments thereof. In embodiments, a Roquin-1 polynucleotide is the genomic sequence, cDNA, mRNA, or gene associated with and/or required for Roquin-1 expression. An exemplary Roquin-1 nucleic acid sequence is provided below (NCBI Ref. Seq. Accession No. NM_001300850.1:88-3492).

>NM_001300850.1:88-3492 Homo sapiens Ring Finger and CCCH-Type Domains 1 (RC3H1), Transcript Variant 1, mRNA
ATGCCTGTACAAGCTCCACAATGGACGGATTTCCTCTCCTGCCCAATTTGCACTCAGACTTT CGACGAAACAATTCGAAAGCCCATCAGTTTGGGTTGTGGCCATACTGTCTGCAAGATGTGCC TGAATAAACTCCACCGCAAGGCTTGCCCATTTGACCAGACCACTATCAATACAGACATTGAG CTCCTCCCTGTGAACTCAGCATTGCTGCAGCTCGTGGGTGCTCAGGTCCCTGAGCAGCAGCC TATTACTTTGTGTAGTGGGGTTGAAGACACAAAGCATTATGAGGAAGCCAAGAAATGTGTAG AAGAATTAGCATTGTACTTAAAACCGCTCAGCAGTGCTAGAGGAGTGGGTCTGAACAGCACT ACTCAGAGTGTTCTGAGTCGCCCAATGCAGAGGAAGCTTGTGACTCTAGTCCACTGTCAACT AGTAGAAGAAGAAGGCAGGATTCGTGCCATGAGGGCAGCTCGATCTTTAGGTGAACGAACAG TTACAGAGCTCATTCTCCAGCACCAGAATCCTCAGCAACTCTCTTCCAATCTTTGGGCAGCA GTAAGGGCTAGGGGATGCCAGTTCCTTGGACCAGCAATGCAGGAGGAAGCTTTAAAGTTGGT TCTGCTGGCCTTAGAAGATGGTTCTGCTTTGTCAAGAAAAGTATTGGTTCTGTTTGTGGTGC AAAGATTGGAGCCACGGTTTCCTCAAGCCTCTAAAACTAGCATTGGGCATGTTGTTCAGCTC CTTTATAGAGCCTCCTGTTTCAAGGTCACCAAACGTGATGAAGACTCTTCTTTGATGCAGCT GAAAGAAGAATTTAGAACCTATGAAGCTCTGCGGCGAGAACATGACTCCCAGATAGTGCAGA TTGCTATGGAAGCAGGCTTACGAATTGCACCGGACCAGTGGTCCTCTTTGCTTTATGGAGAC CAGTCTCACAAATCTCATATGCAGTCCATTATTGACAAGTTGCAGACTCCAGCCTCTTTTGC ACAGAGTGTTCAGGAACTAACAATTGCTCTCCAGCGAACTGGAGACCCAGCAAACTTGAACC GACTAAGACCCCATTTGGAGCTGTTAGCAAACATTGACCCTAGTCCAGATGCTCCTCCTCCT ACTTGGGAACAGCTGGAAAATGGGCTGGTTGCTGTGCGTACAGTGGTACATGGGCTGGTTGA TTATATCCAGAACCACAGCAAAAAAGGAGCAGATCAGCAGCAGCCTCCACAGCATAGCAAAT ACAAAACATACATGTGTCGAGATATGAAGCAGAGAGGAGGATGCCCTCGTGGGGCCAGCTGT ACATTTGCACACTCACAGGAGGAACTGGAAAAATTTCGTAAAATGAATAAGCGCCTGGTTCC GAGAAGACCCTTGAGTGCCTCTTTGGGTCAACTTAATGAGGTGGGCCTGCCTTCAGCAGCTA TCCTTCCAGATGAAGGTGCAGTGGATCTCCCTAGCAGAAAACCTCCTGCTCTGCCAAATGGA ATTGTATCAACAGGGAATACAGTAACACAGCTTATTCCGCGAGGGACAGACCCCAGCTATGA TTCTAGTCTGAAACCAGGAAAAATAGATCATCTGAGCAGTAGTGCTCCTGGATCCCCTCCTG ACCTGCTAGAATCTGTTCCTAAGAGTATTTCTGCCTTACCTGTGAATCCACATTCTATACCT CCAAGGGGGCCAGCAGATCTGCCTCCAATGCCTGTTACCAAACCACTTCAGATGGTACCTCG AGGTTCTCAGTTATATCCAGCACAACAGACGGATGTTTATTATCAGGATCCTCGAGGAGCAG CTCCGCCATTTGAACCAGCACCTTATCAGCAGGGTATGTATTATACTCCACCACCACAATGT GTGTCCCGCTTTGTCCGACCTCCACCATCTGCTCCTGAACCTGCTCCTCCCTACTTGGATCA TTATCCACCCTACCTCCAAGAACGTGTTGTAAACTCTCAGTATGGCACACAGCCACAGCAGT ACCCACCTATATACCCATCTCACTATGATGGCCGTCGAGTGTACCCTGCTCCGTCTTACACA AGAGAAGAGATATTCCGAGAAAGCCCTATACCCATTGAGATTCCACCTGCAGCAGTACCATC GTATGTACCAGAATCCAGAGAAAGATACCAACAGATCGAGAGTTACTATCCAGTGGCTCCTC ATCCAACTCAGATCAGACCTTCGTACCTCAGAGAACCTCCTTATAGCCGGCTTCCTCCTCCT CCCCAGCCTCATCCTAGTCTAGATGAACTACATCGCCGACGAAAGGAAATAATGGCCCAGCT AGAGGAAAGAAAGGTTATCTCTCCACCTCCTTTTGCACCTTCACCAACCTTGCCTCCTACCT TTCATCCGGAAGAATTTTTGGATGAAGACTTGAAGGTAGCTGGGAAATACAAAGGAAATGAT TATAGCCAATACTCTCCCTGGTCATGTGACACCATCGGCTCCTACATTGGAACCAAAGATGC AAAACCCAAAGATGTTGTGGCAGCAGGGAGTGTGGAAATGATGAATGTGGAGAGTAAAGGAA TGAGGGACCAGCGATTAGATCTTCAGAGAAGAGCAGCAGAAACCAGTGATGATGACCTCATC CCATTTGGAGACCGACCAACAGTGTCTCGGTTTGGTGCCATCTCACGAACTTCCAAAACTAT ATATCAGGGTGCTGGTCCAATGCAGGCTATGGCACCTCAGGGAGCTCCTACAAAATCTATTA ACATTTCAGATTATAGTCCATATGGAACCCACGGTGGCTGGGGAGCTTCTCCATATTCACCT CATCAAAACATACCTTCTCAGGGACACTTCAGTGAGAGGGAGAGAATATCTATGTCAGAAGT GGCCAGTCATGGAAAACCCCTTCCATCTGCTGAGAGAGAACAGCTACGACTAGAATTGCAGC AATTGAACCATCAGATTAGCCAGCAGACCCAGCTACGTGGACTAGAGGCTGTTAGTAACAGG CTGGTGTTGCAGAGGGAGGCAAACACCCTGGCAGGCCAGTCACAGCCCCCACCACCGCCACC TCCAAAATGGCCTGGGATGATCTCAAGTGAGCAGTTGAGCTTGGAACTGCACCAGGTGGAAA GGGAAATCGGGAAGAGAACACGGGAACTGAGTATGGAAAACCAGTGTTCTCTGGACATGAAA AGCAAACTGAATACAAGTAAACAAGCAGAAAATGGACAACCAGAACCACAAAACAAGGTTCC GGCTGAGGACCTTACATTGACATTCAGCAGTGATGTACCAAATGGATCAGCCTTGACACAAG AGAATATCAGCCTCCTATCAAACAAGACCAGCTCTCTGAACCTGTCAGAGGACCCTGAGGGA GGAGGGGATAATAATGACTCCCAGAGATCAGGAGTTACTCCCAGTTCTGCTCCTTAA (SEQ ID NO: 653). An exemplary Roquin-1 gene sequence is provided at ENSEMBL Accession No. ENSG00000135870 (SEQ ID NO: 654).

[0107] By “Suppressor of cytokine signaling 1 (SOCS1) polypeptide” is meant a protein having at least about 85% amino acid sequence identity to GenBank Accession No. AAB62401.1, which is provided below, or a fragment thereof having immunomodulatory activity.

>AAB62401.1 suppressor of cytokine signalling-1
[Homo sapiens]
(SEQ ID NO: 655)
MVAHNQVAADNAVSTAAEPRRRPEPSSSSSSSPAAPARPRPCPAV
PAPAPGDTHFRTFRSHADYRRITRASALLDACGFYWGPLSVHGAH
ERLRAEPVGTFLVRDSRQRNCFFALSVKMASGPTSIRVHFQAGRF
HLDGSRESFDCLFELLEHYVAAPRRMLGAPLRQRRVRPLQELCRQ
RIVATVGRENLARIPLNPVLRDYLSSFPFQI.

[0108] By “Suppressor of cytokine signaling 1 (SOCS1) polynucleotide” is meant a polynucleotide encoding a SOCS1 polypeptide, as well as the introns, exons, 3′ untranslated regions, 5′ untranslated regions, and regulatory sequences associated with its expression, or fragments thereof. In embodiments, a SOCS1 polynucleotide is the genomic sequence, cDNA, mRNA, or gene associated with and/or required for SOCS1 expression. An exemplary SOCS1 nucleic acid sequence is provided below (GenBank Accession No. U88326.1:24-659).

>U88326.1:24-659 Human Suppressor of Cytokine Signalling-1 (SOCS-1) mRNA, Complete Cds
ATGGTAGCACACAACCAGGTGGCAGCCGACAATGCAGTCTCCACAGCAGCAGAGCCCCGACG GCGGCCAGAACCTTCCTCCTCTTCCTCCTCCTCGCCCGCGGCCCCCGCGCGCCCGCGGCCGT GCCCCGCGGTCCCGGCCCCGGCCCCCGGCGACACGCACTTCCGCACATTCCGTTCGCACGCC GATTACCGGCGCATCACGCGCGCCAGCGCGCTCCTGGACGCCTGCGGATTCTACTGGGGGCC CCTGAGCGTGCACGGGGCGCACGAGCGGCTGCGCGCCGAGCCCGTGGGCACCTTCCTGGTGC GCGACAGCCGCCAGCGGAACTGCTTTTTCGCCCTTAGCGTGAAGATGGCCTCGGGACCCACG AGCATCCGCGTGCACTTTCAGGCCGGCCGCTTTCACCTGGATGGCAGCCGCGAGAGCTTCGA CTGCCTCTTCGAGCTGCTGGAGCACTACGTGGCGGCGCCGCGCCGCATGCTGGGGGCCCCGC TGCGCCAGCGCCGCGTGCGGCCGCTGCAGGAGCTGTGCCGCCAGCGCATCGTGGCCACCGTG GGCCGCGAGAACCTGGCTCGCATCCCCCTCAACCCCGTCCTCCGCGACTACCTGAGCTCCTT CCCCTTCCAGATTTGA (SEQ ID NO: 656). An exemplary SOCS1 gene sequence is provided at ENSEMBL Accession No. ENSG00000185338 (SEQ ID NO: 657).

[0109] By “SRY-box 4 (SOX4) polypeptide” is meant a protein having at least about 85% amino acid sequence identity to GenBank Accession No. CAA50018.1, which is provided below, or a fragment thereof having immunomodulatory activity.

>CAA50018.1 SOX-4 protein
[Homo sapiens]
(SEQ ID NO: 658)
MVQQTNNAENTEALLAGESSDSGAGLELGIASSPTPGSTASTGGK
ADDPSWCKTPSGHIKRPMNAFMVWSQIERRKIMEQSPDMHNAEIS
KRLGKRWKLLKDSDKIPFIREAERLRLKHMADYPDYKYRPRKKVK
SGNANSSSSAAASSKPGEKGDKVGGSGGGGHGGGGGGGSSNAGGG
GGGASGGGANSKPAQKKSCGSKVAGGAGGGVSKPHAKLILAGGGG
GGKAAAAAAASFAAEQAGAAALLPLGAAADHHSLYKARTPSASAS
ASSAASASAALAAPGKHLAEKKVKRVYLFGGLGTSSSPVGGVGAG
ADPSDPLGLYEEEGAGCSPDAPSLSGRSSAASSPAAGRSPADHRG
YASLRAASPAPSSAPSHASSSASSHSSSSSSSGSSSSDDEFEDDL
LDLNPSSNFESMSLGSFSSSSALDRDLDFNFEPGSGSHFEFPDYC
TPEVSEMISGDWLESSISNLVFTY.

[0110] By “SRY-box 4 (SOX4) polynucleotide” is meant a polynucleotide encoding a SOX4 polypeptide, as well as the introns, exons, 3′ untranslated regions, 5′ untranslated regions, and regulatory sequences associated with its expression, or fragments thereof. In embodiments, a SOX4 polynucleotide is the genomic sequence, cDNA, mRNA, or gene associated with and/or required for SOX4 expression. An exemplary SOX4 nucleic acid sequence is provided below (GenBank Accession No. X70683.1:351-1775).

>X70683.1:351-1775 H. sapiens mRNA for SOX-4 Protein
ATGGTGCAGCAAACCAACAATGCCGAGAACACGGAAGCGCTGCTGGCCGGCGAGAGCTCGGA CTCGGGCGCCGGCCTCGAGCTGGGAATCGCCTCCTCCCCCACGCCCGGCTCCACCGCCTCCA CGGGCGGCAAGGCCGACGACCCGAGCTGGTGCAAGACCCCGAGTGGGCACATCAAGCGACCC ATGAACGCCTTCATGGTGTGGTCGCAGATCGAGCGGCGCAAGATCATGGAGCAGTCGCCCGA CATGCACAACGCCGAGATCTCCAAGCGGCTGGGCAAACGCTGGAAGCTGCTCAAAGACAGCG ACAAGATCCCTTTCATTCGAGAGGCGGAGCGGCTGCGCCTCAAGCACATGGCTGACTACCCC GACTACAAGTACCGGCCCAGGAAGAAGGTGAAGTCCGGCAACGCCAACTCCAGCTCCTCGGC CGCCGCCTCCTCCAAGCCGGGGGAGAAGGGAGACAAGGTCGGTGGCAGTGGCGGGGGCGGCC ATGGGGGCGGCGGCGGCGGCGGGAGCAGCAACGCGGGGGGAGGAGGCGGCGGTGCGAGTGGC GGCGGCGCCAACTCCAAACCGGCGCAGAAAAAGAGCTGCGGCTCCAAAGTGGCGGGCGGCGC GGGCGGTGGGGTTAGCAAACCGCACGCCAAGCTCATCCTGGCAGGCGGCGGCGGCGGCGGGA AAGCAGCGGCTGCCGCCGCCGCCTCCTTCGCCGCCGAACAGGCGGGGGCCGCCGCCCTGCTG CCCCTGGGCGCCGCCGCCGACCACCACTCGCTGTACAAGGCGCGGACTCCCAGCGCCTCGGC CTCCGCCTCCTCGGCAGCCTCGGCCTCCGCAGCGCTCGCGGCCCCGGGCAAGCACCTGGCGG AGAAGAAGGTGAAGCGCGTCTACCTGTTCGGCGGCCTGGGCACGTCGTCGTCGCCCGTGGGC GGCGTGGGCGCGGGAGCCGACCCCAGCGACCCCCTGGGCCTGTACGAGGAGGAGGGCGCGGG CTGCTCGCCCGACGCGCCCAGCCTGAGCGGCCGCAGCAGCGCCGCCTCGTCCCCCGCCGCCG GCCGCTCGCCCGCCGACCACCGCGGCTACGCCAGCCTGCGCGCCGCCTCGCCCGCCCCGTCC AGCGCGCCCTCGCACGCGTCCTCCTCGGCCTCGTCCCACTCCTCCTCTTCCTCCTCCTCGGG CTCCTCGTCCTCCGACGACGAGTTCGAAGACGACCTGCTCGACCTGAACCCCAGCTCAAACT TTGAGAGCATGTCCCTGGGCAGCTTCAGTTCGTCGTCGGCGCTCGACCGGGACCTGGATTTT AACTTCGAGCCCGGCTCCGGCTCGCACTTCGAGTTCCCGGACTACTGCACGCCCGAGGTGAG CGAGATGATCTCGGGAGACTGGCTCGAGTCCAGCATCTCCAACCTGGTTTTCACCTACTGA (SEQ ID NO: 659). An exemplary SOX4 gene sequence is provided at ENSEMBL Accession No. ENSG00000124766 (SEQ ID NO: 670).

[0111] By (“T-BOX transcription factor 21 (T-bet) polypeptide” is meant a protein having at least about 85% amino acid sequence identity to NCBI Reference Sequence: NP_037483.1, provided below, or a fragment thereof and having immunomodulatory activity.

>NP_037483.1 T-box transcription factor TBX21
[Homo sapiens]
(SEQ ID NO: 661)
MGIVEPGCGDMLTGTEPMPGSDEGRAPGADPQHRYFYPEPGAQDA
DERRGGGSLGSPYPGGALVPAPPSRFLGAYAYPPRPQAAGFPGAG
ESFPPPADAEGYQPGEGYAAPDPRAGLYPGPREDYALPAGLEVSG
KLRVALNNHLLWSKFNQHQTEMIITKQGRRMFPFLSFTVAGLEPT
SHYRMFVDVVLVDQHHWRYQSGKWVQCGKAEGSMPGNRLYVHPDS
PNTGAHWMRQEVSFGKLKLTNNKGASNNVTQMIVLQSLHKYQPRL
HIVEVNDGEPEAACNASNTHIFTFQETQFIAVTAYQNAEITQLKI
DNNPFAKGFRENFESMYTSVDTSIPSPPGPNCQFLGGDHYSPLLP
NQYPVPSRFYPDLPGQAKDVVPQAYWLGAPRDHSYEAEFRAVSMK
PAFLPSAPGPTMSYYRGQEVLAPGAGWPVAPQYPPKMGPASWFRP
MRTLPMEPGPGGSEGRGPEDQGPPLVWTEIAPIRPESSDSGLGEG
DSKRRRVSPYPSSGDSSSPAGAPSPFDKEAEGQFYNYFPN.

[0112] By “T-BOX transcription factor 21 (T-bet) polynucleotide” is meant a polynucleotide encoding a T-bet polypeptide, as well as the introns, exons, 3′ untranslated regions, 5′ untranslated regions, and regulatory sequences associated with its expression, or fragments thereof. In embodiments, a T-bet polynucleotide is the genomic sequence, cDNA, mRNA, or gene associated with and/or required for T-bet expression. An exemplary T-bet nucleic acid sequence is provided below (NCBI Ref. Seq. Accession No. NM_013351.2:220-1827).

>NM_013351.2:220-1827 Homo sapiens T-Box Transcription Factor 21 (TBX21), mRNA
ATGGGCATCGTGGAGCCGGGTTGCGGAGACATGCTGACGGGCACCGAGCCGATGCCGGGGAG CGACGAGGGCCGGGCGCCTGGCGCCGACCCGCAGCACCGCTACTTCTACCCGGAGCCGGGCG CGCAGGACGCGGACGAGCGTCGCGGGGGCGGCAGCCTGGGGTCTCCCTACCCGGGGGGCGCC TTGGTGCCCGCCCCGCCGAGCCGCTTCCTTGGAGCCTACGCCTACCCGCCGCGACCCCAGGC GGCCGGCTTCCCCGGCGCGGGCGAGTCCTTCCCGCCGCCCGCGGACGCCGAGGGCTACCAGC CGGGCGAGGGCTACGCCGCCCCGGACCCGCGCGCCGGGCTCTACCCGGGGCCGCGTGAGGAC TACGCGCTACCCGCGGGACTGGAGGTGTCGGGGAAACTGAGGGTCGCGCTCAACAACCACCT GTTGTGGTCCAAGTTTAATCAGCACCAGACAGAGATGATCATCACCAAGCAGGGACGGCGGA TGTTCCCATTCCTGTCATTTACTGTGGCCGGGCTGGAGCCCACCAGCCACTACAGGATGTTT GTGGACGTGGTCTTGGTGGACCAGCACCACTGGCGGTACCAGAGCGGCAAGTGGGTGCAGTG TGGAAAGGCCGAGGGCAGCATGCCAGGAAACCGCCTGTACGTCCACCCGGACTCCCCCAACA CAGGAGCGCACTGGATGCGCCAGGAAGTTTCATTTGGGAAACTAAAGCTCACAAACAACAAG GGGGCGTCCAACAATGTGACCCAGATGATTGTGCTCCAGTCCCTCCATAAGTACCAGCCCCG GCTGCATATCGTTGAGGTGAACGACGGAGAGCCAGAGGCAGCCTGCAACGCTTCCAACACGC ATATCTTTACTTTCCAAGAAACCCAGTTCATTGCCGTGACTGCCTACCAGAATGCCGAGATT ACTCAGCTGAAAATTGATAATAACCCCTTTGCCAAAGGATTCCGGGAGAACTTTGAGTCCAT GTACACATCTGTTGACACCAGCATCCCCTCCCCGCCTGGACCCAACTGTCAATTCCTTGGGG GAGATCACTACTCTCCTCTCCTACCCAACCAGTATCCTGTTCCCAGCCGCTTCTACCCCGAC CTTCCTGGCCAGGCGAAGGATGTGGTTCCCCAGGCTTACTGGCTGGGGGCCCCCCGGGACCA CAGCTATGAGGCTGAGTTTCGAGCAGTCAGCATGAAGCCTGCATTCTTGCCCTCTGCCCCTG GGCCCACCATGTCCTACTACCGAGGCCAGGAGGTCCTGGCACCTGGAGCTGGCTGGCCTGTG GCACCCCAGTACCCTCCCAAGATGGGCCCGGCCAGCTGGTTCCGCCCTATGCGGACTCTGCC CATGGAACCCGGCCCTGGAGGCTCAGAGGGACGGGGACCAGAGGACCAGGGTCCCCCCTTGG TGTGGACTGAGATTGCCCCCATCCGGCCGGAATCCAGTGATTCAGGACTGGGCGAAGGAGAC TCTAAGAGGAGGCGCGTGTCCCCCTATCCTTCCAGTGGTGACAGCTCCTCCCCTGCTGGGGC CCCTTCTCCTTTTGATAAGGAAGCTGAAGGACAGTTTTATAACTATTTTCCCAACTGA (SEQ ID NO: 662). An exemplary T-bet gene sequence is provided at ENSEMBL Accession No. ENSG00000073861 (SEQ ID NO: 663).

[0113] By “Transducin-like enhancer protein (TLE1) polypeptide” is meant a protein having at least about 85% amino acid sequence identity to GenBank Accession No. AAA61192.1, which is provided below, or a fragment thereof having immunomodulatory activity.

>AAA61192.1 transducin-like enhancer protein
[Homo sapiens]
(SEQ ID NO: 664)
MFPQSRHPTPHQAAGQPFKFTIPESLDRIKEEFQFLQAQYHSLKL
ECEKLASEKTEMQRHYVMYYEMSYGLNIEMHKQTEIAKRLNTICA
QVIPFLSQEHQQQVAQAVERAKQVTMAELNAIIGQQQLQAQHLSH
GHGPPVPLTPHPSGLQPPGIPPLGGSAGLLALSSALSGQSHLAIK
DDKKHHDAEHHRDREPGTSNSLLVPDSLRGTDKRRNGPEFSNDIK
KRKVDDKDSSHYDSDGDKSDDNLVVDVSNEDPSSPRASPAHSPRE
NGIDKNRLLKKDASSSPASTASSASSTSLKSKEMSLHEKASTPVL
KSSTPTPRSDMPTPGTSATPGLRPGLGKPPAIDPLVNQAAAGLRT
PLAVPGPYPAPFGMVPHAGMNGELTSPGAAYASLHNMSPQMSAAA
ARGRRGRYGRSPMVGFDPPPHMRVPTIPPNLAGIPGGKPAYSFHV
TADGQMQPVPFPPTPLIGPGIPRHARQINTLNHGEVVCAVTISNP
TRHVYTGGKGCVKVWDISHPGNKSPVSQLDCLNRDNYIRSCKLLP
DGCTLIVGGEASTLSIWDLAAPTPRIKAELTSSAPACYALAISPD
SKVCFSCCSDGNIAVWDLHNQTLVRQFQGHTDGASCIDISNDGTK
LWTGGLDNTVRSWDLREGRQLQQHDFTSQIFSLGYCPTGEWLAVG
MESSNVEVLHVNKPDKYQLHLHESCVLSLKFAYCGKWFVSTGKDN
LLNAWRTPYGASIFQSKESSSVLSCDISVDDKYIVTGSGDKKATV
YEVIY.

[0114] By “Transducin-like enhancer protein (TLE1) polynucleotide” is meant a polynucleotide encoding a TLE1 polypeptide, as well as the introns, exons, 3′ untranslated regions, 5′ untranslated regions, and regulatory sequences associated with its expression, or fragments thereof. In embodiments, a TLE1 polynucleotide is the genomic sequence, cDNA, mRNA, or gene associated with and/or required for TLE1 expression. An exemplary TLE1 nucleic acid sequence is provided below (GenBank Accession No. M99435.1:26-2338).

>M99435.1:26-2338 Human Transducin-Like Enhancer Protein (TLE1) mRNA, Complete Cds
ATGTTCCCGCAGAGCCGGCACCCGACGCCGCACCAGGCTGCAGGCCAGCCCTTCAAGTTCAC TATCCCGGAGTCCCTGGACCGGATTAAAGAGGAATTCCAGTTCCTGCAGGCGCAGTATCACA GCCTTAAATTGGAATGTGAGAAACTGGCAAGTGAAAAGACAGAAATGCAGAGGCACTATGTG ATGTATTATGAAATGTCATATGGATTAAACATTGAAATGCACAAACAGACTGAAATCGCCAA GAGATTGAATACGATTTGTGCACAAGTCATCCCATTTCTGTCTCAGGAACATCAACAACAGG TGGCCCAGGCTGTTGAACGTGCCAAACAGGTGACCATGGCAGAGTTGAATGCCATCATCGGG CAGCAGCAGTTGCAAGCTCAGCATCTTTCTCATGGCCACGGACCCCCAGTTCCCCTTACGCC TCACCCTTCGGGACTTCAGCCTCCTGGAATCCCGCCCCTCGGGGGCAGTGCCGGCCTTCTTG CGCTGTCTAGTGCTCTGAGTGGGCAGTCTCACTTGGCAATAAAAGATGACAAGAAGCACCAC GATGCAGAGCACCACAGAGACAGAGAGCCGGGCACAAGTAATTCCCTCCTGGTCCCAGACAG TCTAAGAGGCACAGATAAACGCAGAAATGGACCTGAATTTTCCAATGACATCAAGAAAAGGA AGGTGGATGATAAGGACTCCAGCCACTATGACAGTGATGGTGACAAAAGCGATGACAACTTA GTTGTGGATGTGTCTAATGAGGACCCTTCTTCTCCGCGAGCAAGCCCTGCCCACTCGCCCCG GGAAAATGGAATCGACAAAAATCGCCTGCTAAAGAAGGATGCTTCTAGCAGTCCAGCTTCCA CGGCCTCCTCGGCAAGTTCCACTTCTTTGAAATCCAAAGAAATGAGCTTGCATGAAAAAGCC AGCACGCCTGTTCTGAAATCCAGCACACCAACGCCTCGGAGCGACATGCCAACGCCGGGCAC CAGCGCCACTCCAGGCCTCCGTCCAGGTCTCGGCAAGCCTCCAGCCATAGACCCCCTCGTTA ACCAAGCGGCAGCTGGCTTGAGGACACCCCTGGCAGTGCCCGGCCCATATCCTGCTCCTTTT GGGATGGTCCCCCACGCTGGCATGAACGGCGAGCTGACCAGCCCAGGCGCTGCCTACGCCAG TTTACACAACATGTCGCCCCAGATGAGCGCCGCAGCCGCCCGCGGCCGCCGTGGTCGGTACG GGCGCTCCCCCATGGTGGGGTTTGATCCTCCCCCTCACATGAGAGTACCTACCATTCCTCCA AACCTGGCAGGAATCCCTGGGGGGAAACCTGCATACTCCTTCCACGTTACTGCAGACGGTCA GATGCAGCCTGTCCCTTTTCCCCCGACGCCCCTCATCGGACCCGGAATCCCCCGGCATGCTC GCCAGATCAACACCCTCAACCACGGGGAGGTGGTGTGCGCTGTGACCATCAGCAACCCCACG AGACACGTGTACACAGGCGGGAAGGGCTGCGTCAAGGTCTGGGACATCAGCCACCCTGGCAA TAAGAGCCCTGTCTCCCAGCTCGACTGTCTGAACAGAGACAATTATATCCGTTCCTGTAAAT TGCTACCCGATGGCTGCACTCTCATAGTGGGAGGGGAAGCCAGTACTTTGTCCATTTGGGAC CTGGCGGCTCCAACCCCGCGCATCAAGGCGGAGCTGACGTCCTCGGCCCCCGCCTGCTACGC CCTGGCCATCAGCCCCGATTCCAAGGTCTGCTTCTCATGCTGCAGCGACGGCAACATCGCTG TGTGGGATCTGCACAACCAGACACTAGTGAGGCAATTCCAGGGCCACACAGACGGAGCCAGC TGTATTGACATTTCTAATGATGGCACCAAGCTCTGGACGGGTGGTTTGGACAACACAGTCAG GTCCTGGGACCTGCGCGAGGGGCGGCAGCTGCAGCAGCACGACTTCACCTCCCAGATCTTCT CCCTGGGGTACTGCCCCACCGGGGAGTGGCTGGCAGTGGGCATGGAGAGCAGCAATGTGGAG GTGCTGCACGTGAACAAGCCTGACAAGTACCAGCTGCACCTGCATGAGAGCTGCGTGCTGTC CCTGAAATTTGCTTACTGTGGTAAATGGTTTGTGAGTACTGGAAAAGATAACCTCCTCAATG CTTGGCGGACCCCCTATGGAGCCAGCATATTCCAGTCCAAAGAGTCCTCGTCAGTGCTTAGC TGTGACATCTCTGTGGATGATAAGTACATAGTCACTGGCTCGGGGGACAAGAAGGCTACAGT CTATGAAGTCATCTACTGA (SEQ ID NO: 665). An exemplary TLE1 gene sequence is provided at ENSEMBL Accession No. ENSG00000150990 (SEQ ID NO: 666).

[0115] By “Transmembrane protein 184B (TMEM184B) polypeptide” is meant a protein having at least about 85% amino acid sequence identity to NCBI Reference Sequence No.: NP_001182000.1, which is provided below, or a fragment thereof having immunomodulatory activity.

>NP_001182000.1 transmembrane protein 184B
isoform a [Homo sapiens]
(SEQ ID NO: 667)
MTVRGDVLAPDPASPTTAAASPSVSVIPEGSPTAMEQPVFLMTTA
AQAISGFFVWTALLITCHQIYMHLRCYSCPNEQRYIVRILFIVPI
YAFDSWLSLLFFTNDQYYVYFGTVRDCYEALVIYNFLSLCYEYLG
GESSIMSEIRGKPIESSCMYGTCCLWGKTYSIGFLRFCKQATLQF
CVVKPLMAVSTVVLQAFGKYRDGDFDVTSGYLYVTIIYNISVSLA
LYALFLFYFATRELLSPYSPVLKFFMVKSVIFLSFWQGMLLAILE
KCGAIPKIHSARVSVGEGTVAAGYQDFIICVEMFFAALALRHAFT
YKVYADKRLDAQGRCAPMKSISSSLKETMNPHDIVQDAIHNFSPA
YQQYTQQSTLEPGPTWRGGAHGLSRSHSLSGARDNEKTLLLSSDD
EF.

[0116] By “Transmembrane protein 184B (TMEM184B) polynucleotide” is meant a polynucleotide encoding a TMEM184B polypeptide, as well as the introns, exons, 3′ untranslated regions, 5′ untranslated regions, and regulatory sequences associated with its expression, or fragments thereof. In embodiments, a TMEM184B polynucleotide is the genomic sequence, cDNA, mRNA, or gene associated with and/or required for TMEM184B expression. An exemplary TMEM184B nucleic acid sequence is provided below (NCBI Ref. Seq. Accession No. NM_001195071.1:225-1448).

>NM_001195071.1:225-1448 Homo sapiens Transmembrane Protein 184B (TMEM184B), Transcript Variant 2, mRNA
ATGACAGTGAGGGGGGATGTGCTGGCCCCGGATCCAGCGTCGCCCACGACCGCAGCAGCCTC GCCCAGCGTCTCCGTGATCCCCGAGGGCAGCCCCACTGCCATGGAGCAGCCTGTGTTCCTGA TGACAACTGCCGCTCAGGCCATCTCTGGCTTCTTCGTGTGGACGGCCCTGCTCATCACATGC CACCAGATCTACATGCACCTGCGCTGCTACAGCTGCCCCAACGAGCAGCGCTACATCGTGCG CATCCTCTTCATCGTGCCCATCTACGCCTTTGACTCCTGGCTCAGCCTCCTCTTCTTCACCA ACGACCAGTACTACGTGTACTTCGGCACCGTCCGCGACTGCTATGAGGCCTTGGTCATCTAT AATTTCCTGAGCCTGTGCTATGAGTACCTAGGAGGAGAAAGTTCCATCATGTCGGAGATCAG AGGAAAACCCATTGAGTCCAGCTGTATGTATGGCACCTGCTGCCTCTGGGGAAAGACTTATT CCATCGGATTTCTGAGGTTCTGCAAACAGGCCACCCTGCAGTTCTGTGTGGTGAAGCCACTC ATGGCGGTCAGCACTGTGGTCCTCCAGGCCTTCGGCAAGTACCGGGATGGGGACTTTGACGT CACCAGTGGCTACCTCTACGTGACCATCATCTACAACATCTCCGTCAGCCTGGCCCTCTACG CCCTCTTCCTCTTCTACTTCGCCACCCGGGAGCTGCTCAGCCCCTACAGCCCCGTCCTCAAG TTCTTCATGGTCAAGTCCGTCATCTTTCTTTCCTTCTGGCAAGGCATGCTCCTGGCCATCCT GGAGAAGTGTGGGGCCATCCCCAAAATCCACTCGGCCCGCGTGTCGGTGGGCGAGGGCACCG TGGCTGCCGGCTACCAGGACTTCATCATCTGTGTGGAGATGTTCTTTGCAGCCCTGGCCCTG CGGCACGCCTTCACCTACAAGGTCTATGCTGACAAGAGGCTGGACGCACAAGGCCGCTGTGC CCCCATGAAGAGCATCTCCAGCAGCCTCAAGGAGACCATGAACCCGCACGACATCGTGCAGG ACGCCATCCACAACTTCTCACCTGCCTACCAGCAGTACACGCAGCAGTCCACCCTGGAGCCT GGGCCCACCTGGCGTGGTGGCGCCCACGGCCTCTCCCGCTCCCACAGCCTCAGTGGCGCCCG CGACAACGAGAAGACTCTCCTGCTCAGCTCTGATGATGAATTCTAG (SEQ ID NO: 668). An exemplary TMEM184B gene sequence is provided at ENSEMBL Accession No. ENSG00000198792 (SEQ ID NO: 669).

[0117] By “Transmembrane protein 222 (TMEM222) polypeptide” is meant a protein having at least about 85% amino acid sequence identity to GenBank Accession No. AAH90039.1, which is provided below, or a fragment thereof having immunomodulatory activity.

>AAH90039.1 TMEM222 protein [Homo sapiens]
(SEQ ID NO: 670)
MAFGKPAKYWKLDPAQVYASGPNAWDTAVHDASEEYKHRMHNLCCDNCH
SHVALALNLMRYNNSTNWNMVTLCFFCLLYGKYVSVGAFVKTWLPFILL
LGIILTVSLVFNLR.

[0118] By “Transmembrane protein 222 (TMEM222) polynucleotide” is meant a polynucleotide encoding a TMEM222 polypeptide, as well as the introns, exons, 3′ untranslated regions, 5′ untranslated regions, and regulatory sequences associated with its expression, or fragments thereof. In embodiments, a TMEM222 polynucleotide is the genomic sequence, cDNA, mRNA, or gene associated with and/or required for TMEM222 expression. An exemplary TMEM222 nucleic acid sequence is provided below (GenBank Accession No. BC090039.1:387-725).

>BC090039.1:387-725 Homo sapiens Transmembrane Protein 222, mRNA (cDNA Clone MGC:111002 IMAGE:6181849), Complete Cds
ATGGCCTTTGGAAAGCCTGCCAAGTACTGGAAGTTGGACCCTGCTCAGGTCTATGCTAGCGG GCCCAACGCATGGGACACGGCTGTGCACGACGCCTCTGAGGAGTACAAGCACCGCATGCACA ATCTCTGCTGTGACAACTGCCACTCGCACGTGGCATTGGCCCTGAATCTGATGCGCTACAAC AACAGCACCAACTGGAATATGGTGACGCTCTGCTTCTTCTGCCTGCTCTACGGGAAGTACGT CAGCGTTGGGGCCTTCGTGAAGACCTGGCTGCCCTTCATCCTTCTCCTGGGCATCATCCTCA CCGTCAGCCTGGTCTTTAACCTCCGGTGA (SEQ ID NO: 671). An exemplary TMEM222 gene sequence is provided at ENSEMBL Accession No. ENSG00000186501 (SEQ ID NO: 672).

[0119] By “Tumor necrosis factor alpha (TNFα or TNFa) polypeptide” is meant a protein having at least about 85% amino acid sequence identity to GenBank Accession No. CAA26669.1, provided below, or a fragment thereof and having immunomodulatory activity.

>CAA26669.1 TNF-alpha [Homo sapiens]
(SEQ ID NO: 673)
MSTESMIRDVELAEEALPKKTGGPQGSRRCLFLSLFSFLIVAGATTLFC
LLHFGVIGPQREEFPRDLSLISPLAQAVRSSSRTPSDKPVAHVVANPQA
EGQLQWLNRRANALLANGVELRDNQLVVPSEGLYLIYSQVLFKGQGCPS
THVLLTHTISRIAVSYQTKVNLLSAIKSPCQRETPEGAEAKPWYEPIYL
GGVFQLEKGDRLSAEINRPDYLDFAESGQVYFGIIAL.

[0120] By “Tumor necrosis factor alpha (TNFα or TNFa) polynucleotide” is meant a polynucleotide encoding an Tumor Necrosis Factor Alpha polypeptide, as well as the introns, exons, 3′ untranslated regions, 5′ untranslated regions, and regulatory sequences associated with its expression, or fragments thereof. In embodiments, a Tumor Necrosis Factor Alpha polynucleotide is the genomic sequence, cDNA, mRNA, or gene associated with and/or required for Tumor Necrosis Factor Alpha expression. An exemplary Tumor Necrosis Factor Alpha nucleic acid sequence is provided below (GenBank Accession No. X02910.1: 796-981,1589-1634,1822-1869,2171-2592).

### >X02910.1:796-981,1589-1634,1822-1869,2171-2592 Human Gene for Tumor Necrosis Factor (TNF-Alpha)

ATGAGCACTGAAAGCATGATCCGGGACGTGGAGCTGGCCGAGGAGGCGCTCCCCAAGAAGAC AGGGGGGCCCCAGGGCTCCAGGCGGTGCTTGTTCCTCAGCCTCTTCTCCTTCCTGATCGTGG CAGGCGCCACCACGCTCTTCTGCCTGCTGCACTTTGGAGTGATCGGCCCCCAGAGGGAAGAG TTCCCCAGGGACCTCTCTCTAATCAGCCCTCTGGCCCAGGCAGTCAGATCATCTTCTCGAAC CCCGAGTGACAAGCCTGTAGCCCATGTTGTAGCAAACCCTCAAGCTGAGGGGCAGCTCCAGT GGCTGAACCGCCGGGCCAATGCCCTCCTGGCCAATGGCGTGGAGCTGAGAGATAACCAGCTG GTGGTGCCATCAGAGGGCCTGTACCTCATCTACTCCCAGGTCCTCTTCAAGGGCCAAGGCTG CCCCTCCACCCATGTGCTCCTCACCCACACCATCAGCCGCATCGCCGTCTCCTACCAGACCA AGGTCAACCTCCTCTCTGCCATCAAGAGCCCCTGCCAGAGGGAGACCCCAGAGGGGGCTGAG GCCAAGCCCTGGTATGAGCCCATCTATCTGGGAGGGGTCTTCCAGCTGGAGAAGGGTGACCG ACTCAGCGCTGAGATCAATCGGCCCGACTATCTCGACTTTGCCGAGTCTGGGCAGGTCTACT TTGGGATCATTGCCCTGTGA (SEQ ID NO: 674). An exemplary TNFα gene sequence is provided at ENSEMBL Accession No. ENSG00000232810 (SEQ ID NO: 675).

[0121] By “T cell receptor alpha chain (TRAC) polypeptide” is meant a protein having at least about 85% amino acid sequence identity to GenBank Accession No.: AAO72258.1, which is provided below, or a fragment thereof having immunomodulatory activity.

>AAO72258.1 T cell receptor alpha chain
[Homo sapiens]
(SEQ ID NO: 676)
METLLGVSLVILWLQLARVNSQQGEEDPQALSIQEGENATMNCSYKTSI
NNLQWYRQNSGRGLVHLILIRSNEREKHSGRLRVTLDTSKKSSSLLITA
SRAADTASYFCATANAGGTSYGKLTFGQGTILTVHPNIQNPDPAVYQLR
DSKSSDKSVCLFTDFDSQTNVSQSKDSDVYITDKTVLDMRSMDFKSNSA
VAWSNKSDFACANAFNNSIIPEDTFFPSPESSCDVKLVEKSFETDTNLN
FQNLSVIGFRILLLKVAGFNLLMTLRLWSS.

[0122] By “T cell receptor alpha chain (TRAC) polynucleotide” is meant a polynucleotide encoding a TRAC polypeptide, as well as the introns, exons, 3′ untranslated regions, 5′ untranslated regions, and regulatory sequences associated with its expression, or fragments thereof. In embodiments, a TRAC polynucleotide is the genomic sequence, cDNA, mRNA, or gene associated with and/or required for TRAC expression. An exemplary TRAC nucleic acid sequence is provided below (GenBank Accession No. AY247834.1).

>AY247834.1 Homo sapiens T Cell Receptor Alpha Chain (TCRA) mRNA, TCRA-AV17S1 J52 AC Allele, Complete Cds
ATGGAAACTCTCCTGGGAGTGTCTTTGGTGATTCTATGGCTTCAACTGGCTAGGGTGAACAG TCAACAGGGAGAAGAGGATCCTCAGGCCTTGAGCATCCAGGAGGGTGAAAATGCCACCATGA ACTGCAGTTACAAAACTAGTATAAACAATTTACAGTGGTATAGACAAAATTCAGGTAGAGGC CTTGTCCACCTAATTTTAATACGTTCAAATGAAAGAGAGAAACACAGTGGAAGATTAAGAGT CACGCTTGACACTTCCAAGAAAAGCAGTTCCTTGTTGATCACGGCTTCCCGGGCAGCAGACA CTGCTTCTTACTTCTGTGCTACGGCTAATGCTGGTGGTACTAGCTATGGAAAGCTGACATTT GGACAAGGGACCATCTTGACTGTCCATCCAAATATCCAGAACCCTGACCCTGCCGTGTACCA GCTGAGAGACTCTAAATCCAGTGACAAGTCTGTCTGCCTATTCACCGATTTTGATTCTCAAA CAAATGTGTCACAAAGTAAGGATTCTGATGTGTATATCACAGACAAAACTGTGCTAGACATG AGGTCTATGGACTTCAAGAGCAACAGTGCTGTGGCCTGGAGCAACAAATCTGACTTTGCATG TGCAAACGCCTTCAACAACAGCATTATTCCAGAAGACACCTTCTTCCCCAGCCCAGAAAGTT CCTGTGATGTCAAGCTGGTCGAGAAAAGCTTTGAAACAGATACGAACCTAAACTTTCAAAAC CTGTCAGTGATTGGGTTCCGAATCCTCCTCCTGAAAGTGGCCGGGTTTAATCTGCTCATGAC GCTGCGGCTGTGGTCCAGCTGA (SEQ ID NO: 677). An exemplary TRAC gene sequence is provided at ENSEMBL Accession No. ENSG00000277734 (SEQ ID NO: 678).

[0123] By “adenine” or “9H-Purin-6-amine” is meant a purine nucleobase with the molecular formula C₅H₅N₅, having the structure

[chemical structure]

and corresponding to CAS No. 73-24-5.

[0124] By “adenosine” or “4-Amino-1-[(2R,3R,4S,5R)-3,4-dihydroxy-5-(hydroxymethyl)oxolan-2-yl]pyrimidin-2(1H)-one” is meant an adenine molecule attached to

[chemical structure]

a ribose sugar via a glycosidic bond, having the structure and corresponding to CAS No. 65-46-3. Its molecular formula is C₁₀H₁₃N₅O₄.

[0125] By “adenosine deaminase” or “adenine deaminase” is meant a polypeptide or fragment thereof capable of catalyzing the hydrolytic deamination of adenine or adenosine. In some embodiments, the deaminase or deaminase domain is an adenosine deaminase catalyzing the hydrolytic deamination of adenosine to inosine or deoxy adenosine to deoxyinosine. In some embodiments, the adenosine deaminase catalyzes the hydrolytic deamination of adenine or adenosine in deoxyribonucleic acid (DNA). The adenosine deaminases (e.g., engineered adenosine deaminases, evolved adenosine deaminases) provided herein may be from any organism (e.g., eukaryotic, prokaryotic), including but not limited to algae, bacteria, fungi, plants, invertebrates (e.g., insects), and vertebrates (e.g., amphibians, mammals). In some embodiments, the adenosine deaminase is an adenosine deaminase variant with one or more alterations and is capable of deaminating both adenine and cytosine in a target polynucleotide (e.g., DNA, RNA) and may be referred to as a “dual deaminase”. Non-limiting examples of dual deaminases include those described in PCT/US22/22050. In some embodiments, the target polynucleotide is single or double stranded. In some embodiments, the adenosine deaminase variant is capable of deaminating both adenine and cytosine in DNA. In some embodiments, the adenosine deaminase variant is capable of deaminating both adenine and cytosine in single-stranded DNA. In some embodiments, the adenosine deaminase variant is capable of deaminating both adenine and cytosine in RNA. In embodiments, the adenosine deaminase variant is selected from those described in PCT/US2020/018192, PCT/US2020/049975, PCT/US2017/045381, and PCT/US2020/028568, the full contents of which are each incorporated herein by reference in their entireties for all purposes.

[0126] By “adenosine deaminase activity” is meant catalyzing the deamination of adenine or adenosine to guanine in a polynucleotide. In some embodiments, an adenosine deaminase variant as provided herein maintains adenosine deaminase activity (e.g., at least about 30%, 40%, 50%, 60%, 70%, 80%, 90% or more of the activity of a reference adenosine deaminase (e.g., TadA*8.20 or TadA*8.19)).

[0127] By “Adenosine Base Editor (ABE)” is meant a base editor comprising an adenosine deaminase.

[0128] By “Adenosine Base Editor (ABE) polynucleotide” is meant a polynucleotide encoding an ABE.

[0129] By “Adenosine Base Editor 8 (ABE8) polypeptide” or “ABE8” is meant a base editor as defined herein comprising an adenosine deaminase or adenosine deaminase variant comprising one or more of the alterations listed in Table 5B, one of the combinations of alterations listed in Table 5B, or an alteration at one or more of the amino acid positions listed in Table 5B, such alterations are relative to the following reference sequence: MSEVEFSHEYWMRHALTLAKRARDEREVPVGAVLVLNNRVIGEGWNRAIGLHDPTAHAEIMA LRQGGLVMQNYRLIDATLYVTFEPCVMCAGAMIHSRIGRVVFGVRNAKTGAAGSLMDVLHYP GMNHRVEITEGILADECAALLCYFFRMPRQVFNAQKKAQSSTD (SEQ ID NO: 1), or a corresponding position in another adenosine deaminase. In embodiments, ABE8 comprises alterations at amino acids 82 and/or 166 of SEQ ID NO: 1 In some embodiments, ABE8 comprises further alterations, as described herein, relative to the reference sequence.

[0130] By “Adenosine Base Editor 8 (ABE8) polynucleotide” is meant a polynucleotide encoding an ABE8 polypeptide.

[0131] “Administering” is referred to herein as providing one or more compositions described herein to a patient or a subject. By way of example and without limitation, composition administration (e.g., injection) can be performed by intravenous (i.v.) injection, sub-cutaneous (s.c.) injection, intradermal (i.d.) injection, intraperitoneal (i.p.) injection, or intramuscular (i.m.) injection. One or more such routes can be employed. Parenteral administration can be, for example, by bolus injection or by gradual perfusion over time. In some embodiments, parenteral administration includes infusing or injecting intravascularly, intravenously, intramuscularly, intraarterially, intrathecally, intratumorally, intradermally, intraperitoneally, transtracheally, subcutaneously, subcuticularly, intraarticularly, subcapsularly, subarachnoidly and intrasternally. Alternatively, or concurrently, administration can be by the oral route.

[0132] By “agent” is meant any cell, small molecule chemical compound, antibody, nucleic acid molecule, or polypeptide, or fragments thereof.

[0133] “Allogeneic,” as used herein, refers to cells that are genetically dissimilar from the cells of a subject to which they are to be administered. In embodiments, allogeneic cells are administered to a genetically dissimilar and/or immunologically incompatible subject.

[0134] By “alteration” is meant a change in the level, structure, or activity of an analyte, gene or polypeptide as detected by standard art known methods such as those described herein. As used herein, an alteration includes a change (e.g., increase or reduction) in expression levels. In embodiments, the increase or reduction in expression levels is by 10%, 25%, 40%, 50% or greater. In some embodiments, an alteration includes an insertion, deletion, or substitution of a nucleobase or amino acid (by, e.g., genetic engineering).

[0135] By “ameliorate” is meant reduce, suppress, attenuate, diminish, arrest, or stabilize the development or progression of a disease.

[0136] By “analog” is meant a molecule that is not identical but has analogous functional or structural features. For example, a polypeptide analog retains the biological activity of a corresponding naturally-occurring polypeptide, while having certain biochemical modifications that enhance the analog's function relative to a naturally occurring polypeptide. Such biochemical modifications could increase the analog's protease resistance, membrane permeability, or half-life, without altering, for example, ligand binding. An analog may include an unnatural amino acid.

[0137] As used herein, the term “antibody” refers to an immunoglobulin molecule that specifically binds to, or is immunologically reactive with, a particular antigen. The term “antibody” includes polyclonal, monoclonal, genetically engineered, and otherwise modified forms of antibodies, including but not limited to chimeric antibodies, humanized antibodies, heteroconjugate antibodies (e.g., bi- tri- and quad-specific antibodies, diabodies, triabodies, and tetrabodies), and antigen binding fragments of antibodies, including, for example, Fab′, F(ab′)2, Fab, Fv, rlgG, and scFv fragments. Further non-limiting examples of antibodies include nanobodies and VHH domains. Unless otherwise indicated, the term “monoclonal antibody” (mAb) is meant to include both intact molecules, as well as antibody fragments (including, for example, Fab and F(ab′)2 fragments) that are capable of specifically binding to a target protein. As used herein, the Fab and F(ab′)2 fragments refer to antibody fragments that lack the Fc fragment of an intact antibody. Examples of these antibody fragments are described herein. Typically, an antibody binds to an antigen using a combination of a variable light chain (VL) and a corresponding variable heavy chain (VH) domain.

[0138] The term “antigen-binding domain” refers to a polypeptide or fragment thereof that binds an antigen. In embodiments, two or more antigen-binding domains can function in combination to bind an antigen. In some embodiments, the antigen-binding domain is a region of an antibody.

[0139] Antibodies (immunoglobulins) comprise two heavy chains linked together by disulfide bonds, and two light chains, with each light chain being linked to a respective heavy chain by disulfide bonds in a “Y” shaped configuration. Each heavy chain has at one end a variable domain (VH) followed by a number of constant domains (CH). Each light chain has a variable domain (VL) at one end and a constant domain (CL) at its other end. The variable domain of the light chain (VL) is aligned with the variable domain of the heavy chain (VL), and the light chain constant domain (CL) is aligned with the first constant domain of the heavy chain (CH1). The variable domains of each pair of light and heavy chains form the antigen binding site. The isotype of the heavy chain (gamma, alpha, delta, epsilon or mu) determines the immunoglobulin class (IgG, IgA, IgD, IgE or IgM, respectively). The light chain is either of two isotypes (kappa (κ) or lambda (λ)) found in all antibody classes. The terms “antibody” or “antibodies” include intact antibodies, such as polyclonal antibodies or monoclonal antibodies (mAbs), as well as proteolytic portions or fragments thereof, such as the Fab or F(ab′)2 fragments, that are capable of specifically binding to a target protein. Antibodies may include chimeric antibodies; recombinant and engineered antibodies, and antigen binding fragments thereof. Exemplary functional antibody fragments comprising whole or essentially whole variable regions of both the light and heavy chains are defined as follows: (i) Fv, defined as a genetically engineered fragment consisting of the variable region of the light chain and the variable region of the heavy chain expressed as two chains; (ii) single-chain Fv (“scFv”), a genetically engineered single-chain molecule including the variable region of the light chain and the variable region of the heavy chain, linked by a suitable polypeptide linker; (iii) Fab, a fragment of an antibody molecule containing a monovalent antigen-binding portion of an antibody molecule, obtained by treating an intact antibody with the enzyme papain to yield the intact light chain and the Fd fragment of the heavy chain, which consists of the variable and CH1 domains thereof; (iv) Fab′, a fragment of an antibody molecule containing a monovalent antigen-binding portion of an antibody molecule, obtained by treating an intact antibody with the enzyme pepsin, followed by reduction (two Fab′ fragments are generated per antibody molecule); and (v) F(ab′)2, a fragment of an antibody molecule containing a monovalent antigen-binding portion of an antibody molecule, obtained by treating an intact antibody with the enzyme pepsin (i.e., a dimer of Fab′ fragments held together by two disulfide bonds).

[0140] By “base editor (BE),” or “nucleobase editor polypeptide (NBE)” is meant an agent that binds a polynucleotide and has nucleobase modifying activity. In various embodiments, the base editor comprises a nucleobase modifying polypeptide (e.g., a deaminase) and a polynucleotide programmable nucleotide binding domain (e.g., Cas9 or Cpf1). Representative nucleic acid and protein sequences of base editors include those sequences having about or at least about 85% sequence identity to any base editor sequence provided in the sequence listing, such as those corresponding to SEQ ID NOs: 2-11.

[0141] By “BE4 cytidine deaminase (BE4) polypeptide,” is meant a base editor comprising a nucleic acid programmable DNA binding protein (napDNAbp) domain, a cytidine deaminase domain, and two uracil glycosylase inhibitor domains (UGIs). In embodiments, the napDNAbp is a Cas9n(D10A) polypeptide. Non-limiting examples of cytidine deaminase domains include rAPOBEC, ppAPOBEC, RrA3F, AmAPOBEC1, and SsAPOBEC3B.

[0142] By “BE4 cytidine deaminase (BE4) polynucleotide,” is meant a polynucleotide encoding a BE4 polypeptide.

[0143] By “base editing activity” is meant acting to chemically alter a base within a polynucleotide. In one embodiment, a first base is converted to a second base. In one embodiment, the base editing activity is cytidine deaminase activity, e.g., converting target C·G to T·A. In another embodiment, the base editing activity is adenosine or adenine deaminase activity, e.g., converting A·T to G·C.

[0144] By “base editing efficiency” is meant the total percent of one or more target bases in a sample that have been modified using a base editor. In some cases, the base editing efficiency is calculated as the total percent of target polynucleotides in a sample containing a modified target base. In some instances, the base editing efficiency is calculated as the total percent of target polynucleotides in a sample containing a modification to one or more (e.g., 2, 3, 4, 5, 6, 7, 8, 9 or 10) of 2, 3, 4, 5, 6, 7, 8, 9, or 10 target bases. Methods for measuring base editing efficiency for a base editor are known in the art (see, e.g., Gaudelli, et al. Nature 551:464-471 (2017), the disclosure of which is incorporated herein in its entirety for all purposes). In some cases a base editing efficiency is a median base editing efficiency calculated across 2, 3, 4, 5, 6, 7, 8, 9, 10, 15, 20, 25, 30, 35, 40, 45, 50, 60, 70, 80, 90, 100 or more target sites.

[0145] By “base editing window” for a base editor is meant bases within a target polynucleotide sequence that can be modified using the base editor. In some embodiments, the position of the nucleobases in the target polynucleotide sequence are numbered relative to a protospacer adjacent motif (PAM) for which a nucleic acid programmable DNA binding protein (napDNAbp) domain of the base editor has specificity, where base 1 corresponds to the base immediately adjacent to the PAM. In some embodiments, the position of the nucleobases in the target polynucleotide sequence are numbered relative to the 5′ or 3′ end of a spacer of a guide polynucleotide used to guide a nucleic acid programmable DNA binding protein (napDNAbp) domain of the base editor to a target site, where base 1 corresponds to the 5′ or 3′ terminal base of the spacer.

[0146] The term “base editor system” refers to an intermolecular complex for editing a nucleobase of a target nucleotide sequence. In various embodiments, the base editor (BE) system comprises (1) a polynucleotide programmable nucleotide binding domain, a deaminase domain (e.g., cytidine deaminase or adenosine deaminase) for deaminating nucleobases in the target nucleotide sequence; and (2) one or more guide polynucleotides (e.g., guide RNA) in conjunction with the polynucleotide programmable nucleotide binding domain. In various embodiments, the base editor (BE) system comprises a nucleobase editor domain selected from an adenosine deaminase or a cytidine deaminase, and a domain having nucleic acid sequence specific binding activity. In some embodiments, the base editor system comprises (1) a base editor (BE) comprising a polynucleotide programmable DNA binding domain and a deaminase domain for deaminating one or more nucleobases in a target nucleotide sequence; and (2) one or more guide RNAs in conjunction with the polynucleotide programmable DNA binding domain. In some embodiments, the polynucleotide programmable nucleotide binding domain is a polynucleotide programmable DNA binding domain. In some embodiments, the base editor is a cytidine base editor (CBE). In some embodiments, the base editor is an adenine or adenosine base editor (ABE). In some embodiments, the base editor is an adenine or adenosine base editor (ABE) or a cytidine or cytosine base editor (CBE). In some embodiments, the base editor system (e.g., a base editor system comprising a cytidine deaminase) comprises a uracil glycosylase inhibitor or other agent or peptide (e.g., a uracil stabilizing protein such as provided in WO2022015969, the disclosure of which is incorporated herein by reference in its entirety for all purposes) that inhibits the inosine base excision repair system.

[0147] The term “Cas9” or “Cas9 domain” refers to an RNA guided nuclease comprising a Cas9 protein, or a fragment thereof (e.g., a protein comprising an active, inactive, or partially active DNA cleavage domain of Cas9, and/or the gRNA binding domain of Cas9). A Cas9 nuclease is also referred to sometimes as a casnl nuclease or a CRISPR (clustered regularly interspaced short palindromic repeat) associated nuclease.

[0148] By “chimeric antigen receptor” or “CAR” is meant a synthetic or engineered receptor comprising an extracellular antigen binding domain operationally joined to one or more intracellular signaling domains where the CAR confers specificity for an antigen bound by the extracellular antigen binding domain onto an immune effector cell. In some cases, the intracellular signaling domain is a T cell signaling domain. In embodiments, the immune effector cell is a T cell, an NK cell, or a macrophage. In embodiments, the CAR is a SUPRA CAR, an anti-tag CAR, a TCR-CAR, or a TCR-like CAR (see, e.g., Guedan, et al. “Engineering and Design of Chimeric Antigen Receptors,” Methods and Clinical Development, 12:145-156 (2019); Poorebrahim, et al., “TCR-like CARs and TCR-CARs targeting neoepitopes: an emerging potential,” Cancer Gene Therapy, 28:581-589 (2021); and Minutolo, et al. “The Emergence of Universal Immune Receptor T Cell Therapy for Cancer,” Front Oncol., 9:176 (2019), the disclosures of which are incorporated herein by reference in their entireties for all purposes). In various embodiments, a CAR polypeptide of the disclosure comprises a polypeptide or polynucleotide sequence having about or at least about 85%, 90%, 95%, 96%, 97%, 98%, 99%, or more sequence identity to one or more polypeptide or polynucleotide sequence listed in Table 12 or Table 13 or to one or more of SEQ ID NOs: 830-833, or functional fragments thereof.

[0149] By “chimeric antigen receptor (CAR) T cell” or “CAR-T cell” is meant a T cell expressing a CAR that has antigen specificity determined by the antibody-derived targeting domain of the CAR. As used herein, “CAR-T cells” include T cells, regulatory T cells (T_{REG}), macrophages, or NK cells. As used herein, the term “CAR-T cells” includes cells engineered to express a CAR or a T cell receptor (TCR, sometimes referred to as TCR-CARs or TCR-like CARs). Methods of making CARs (e.g., for treatment of cancer) are publicly available (see, e.g., Park et al., Trends Biotechnol., 29:550-557, 2011; Grupp et al., N Engl J Med., 368:1509-1518, 2013; Han et al., J. Hematol Oncol. 6:47, 2013; Haso et al., (2013) Blood, 121, 1165-1174; Mohseni, et al., (2020) Front. Immunol., 11, art. 1608, doi: 10.3389/fimmu.2020.01608; Eggenhuizen, et al. Int. J. Mol. Sci. (2020), 21:7015, doi: 10.3390/ijms21197015; Poorebrahim, et al., Cancer Gene Ther 28, 581-589 (2021), doi.org/10.1038/s41417-021-00307-7, PCT Pubs. WO2012/079000, WO2013/059593; and U.S. Pub. 2012/0213783, the disclosure of each of which is incorporated herein by reference herein in its entirety).

[0150] The term “conservative amino acid substitution” or “conservative mutation” refers to the replacement of one amino acid by another amino acid with a common property. A functional way to define common properties between individual amino acids is to analyze the normalized frequencies of amino acid changes between corresponding proteins of homologous organisms (Schulz, G. E. and Schirmer, R. H., Principles of Protein Structure, Springer-Verlag, New York (1979)). According to such analyses, groups of amino acids can be defined where amino acids within a group exchange preferentially with each other, and therefore resemble each other most in their impact on the overall protein structure (Schulz, G. E. and Schirmer, R. H., supra). Non-limiting examples of conservative mutations include amino acid substitutions of amino acids, for example, lysine for arginine and vice versa such that a positive charge can be maintained; glutamic acid for aspartic acid and vice versa such that a negative charge can be maintained; serine for threonine such that a free —OH can be maintained; and glutamine for asparagine such that a free —NH₂ can be maintained.

[0151] Amino acids generally can be grouped into classes according to the following common side-chain properties:
[0152] (1) hydrophobic: Norleucine, Met, Ala, Val, Leu, He;
[0153] (2) neutral hydrophilic: Cys, Ser, Thr, Asn, Gin;
[0154] (3) acidic: Asp, Glu;
[0155] (4) basic: His, Lys, Arg;
[0156] (5) residues that influence chain orientation: Gly, Pro;
[0157] (6) aromatic: Trp, Tyr, Phe. In some embodiments, conservative substitutions can involve the exchange of a member of one of these classes for another member of the same class. In some embodiments, non-conservative amino acid substitutions can involve exchanging a member of one of these classes for another class.

[0158] The term “coding sequence” or “protein coding sequence” as used interchangeably herein refers to a segment of a polynucleotide that codes for a protein. Coding sequences can also be referred to as open reading frames. The region or sequence is bounded nearer the 5′ end by a start codon and nearer the 3′ end with a stop codon. Stop codons useful with the base editors described herein include the following: TAG, TAA, and TGA.

[0159] By “complex” is meant a combination of two or more molecules whose interaction relies on inter-molecular forces. Non-limiting examples of inter-molecular forces include covalent and non-covalent interactions. Non-limiting examples of non-covalent interactions include hydrogen bonding, ionic bonding, halogen bonding, hydrophobic bonding, van der Waals interactions (e.g., dipole-dipole interactions, dipole-induced dipole interactions, and London dispersion forces), and π-effects. In an embodiment, a complex comprises polypeptides, polynucleotides, or a combination of one or more polypeptides and one or more polynucleotides. In one embodiment, a complex comprises one or more polypeptides that associate to form a base editor (e.g., base editor comprising a nucleic acid programmable DNA binding protein, such as Cas9, and a deaminase) and a polynucleotide (e.g., a guide RNA). In an embodiment, the complex is held together by hydrogen bonds. It should be appreciated that one or more components of a base editor (e.g., a deaminase, or a nucleic acid programmable DNA binding protein) may associate covalently or non covalently. As one example, a base editor may include a deaminase covalently linked to a nucleic acid programmable DNA binding protein (e.g., by a peptide bond). Alternatively, a base editor may include a deaminase and a nucleic acid programmable DNA binding protein that associate noncovalently (e.g., where one or more components of the base editor are supplied in trans and associate directly or via another molecule such as a protein or nucleic acid). In an embodiment, one or more components of the complex are held together by hydrogen bonds.

[0160] By “cytosine” or “4-Aminopyrimidin-2(1H)-one” is meant a purine nucleobase with

[chemical structure]

the molecular formula C₄H₅N₃O, having the structure NH₂ and corresponding to CAS No. 71-30-7.

[0161] By “cytidine” is meant a cytosine molecule attached to a ribose sugar via a glycosidic

[chemical structure]

bond, having the structure, and corresponding to CAS No. 65-46-3. Its molecular formula is C₉H₁₃N₃O₅.

[0162] By “Cytidine Base Editor (CBE)” is meant a base editor comprising a cytidine deaminase.

[0163] By “Cytidine Base Editor (CBE) polynucleotide” is meant a polynucleotide encoding a CBE.

[0164] By “cytidine deaminase” or “cytosine deaminase” is meant a polypeptide or fragment thereof capable of deaminating cytidine or cytosine. In embodiments, the cytidine or cytosine is present in a polynucleotide. In one embodiment, the cytidine deaminase converts cytosine to uracil or 5-methylcytosine to thymine. The terms “cytidine deaminase” and “cytosine deaminase” are used interchangeably throughout the application. Petromyzon marinus cytosine deaminase 1 (PmCDA1) (SEQ ID NO: 13-14), Activation-induced cytidine deaminase (AICDA) (SEQ ID NOs: 15-21), and APOBEC (SEQ ID NOs: 12-61) are exemplary cytidine deaminases. Further exemplary cytidine deaminase (CDA) sequences are provided in the Sequence Listing as SEQ ID NOs: 62-66 and SEQ ID NOs: 67-189. Non-limiting examples of cytidine deaminases include those described in PCT/US20/16288, PCT/US2018/021878, 180802-021804/PCT, PCT/US2018/048969, and PCT/US2016/058344. By “cytosine deaminase activity” is meant catalyzing the deamination of cytosine or cytidine. In one embodiment, a polypeptide having cytosine deaminase activity converts an amino group to a carbonyl group. In an embodiment, a cytosine deaminase converts cytosine to uracil (i.e., C to U) or 5-methylcytosine to thymine (i.e., 5mC to T). In some embodiments, a cytosine deaminase as provided herein has increased cytosine deaminase activity (e.g., at least 10-fold, 20-fold, 30-fold, 40-fold, 50-fold, 60-fold, 70-fold, 80-fold, 90-fold, 100-fold or more) relative to a reference cytosine deaminase.

[0165] By “cytotoxic capacity” is meant the ability of an immune effector cell to mediate the killing of a target cell. In some embodiments, the immune effector cell is a chimeric antigen receptor (CAR) expressing T cell (CAR-T cell). In some embodiments the target cell is a neoplastic cell. In various embodiments, cytotoxic capacity may be measured as killing of target cells, expression of activation markers (e.g., OX40, CD25), expression of stimulatory signals (e.g., ICOS, CD28), and/or expression of cytokines (e.g., IL-2, IL-6, IFN-gamma, TNF-alpha, granzyme B).

[0166] The term “deaminase” or “deaminase domain,” as used herein, refers to a protein or fragment thereof that catalyzes a deamination reaction.

[0167] “Detect” refers to identifying the presence, absence or amount of the analyte to be detected. In one embodiment, a sequence alteration in a polynucleotide or polypeptide is detected. In another embodiment, the presence of indels is detected.

[0168] By “detectable label” is meant a composition that when linked to a molecule of interest renders the latter detectable, via spectroscopic, photochemical, biochemical, immunochemical, or chemical means. For example, useful labels include radioactive isotopes, magnetic beads, metallic beads, colloidal particles, fluorescent dyes, electron-dense reagents, enzymes (for example, as commonly used in an enzyme linked immunosorbent assay (ELISA)), biotin, digoxigenin, or haptens.

[0169] By “disease” is meant any condition or disorder that damages or interferes with the normal function of a cell, tissue, or organ. In some embodiments, the disease is a cancer (e.g., a hematological cancer or a solid tumor). In some instances, the disease is a disease that can be treated using the base edited CAR-T cells of the disclosure. In one embodiment, the disease is a neoplasia or cancer. In some embodiments, the disease is a hematological cancer. By “hematological cancer” is meant a malignancy of immune system cells. In some embodiments, the hematological cancer is leukemia, myeloma, and/or lymphoma. Lymphomas and Leukemias are examples of “liquid cancers” or cancers present in the blood and are derived from the transformation of either a hematopoietic precursor in the bone marrow or a mature hematopoietic cell in the blood. Leukemias can be lymphoid or myeloid, and acute or chronic. In the case of myelomas, the transformed cell is a fully differentiated plasma cell that may be present as a dispersed collection of malignant cells or as a solid mass in the bone marrow. In the case of lymphomas, a transformed lymphocyte in a secondary lymphoid tissue generates a solid mass. Lymphomas are classified either Hodgkin lymphoma (HL) or non-Hodgkin lymphoma (NHL). In some instances, the hematologic cancer is a mantle cell lymphoma (MCL) or a B cell lymphoma (BCL). The disease in some cases is an autoimmune disease.

[0170] By “dual editing activity” or “dual deaminase activity” is meant having adenosine deaminase and cytidine deaminase activity. In one embodiment, a base editor having dual editing activity has both A→G and C→T activity, wherein the two activities are approximately equal or are within about 10% or 20% of each other. In another embodiment, a dual editor has A→G activity that no more than about 10% or 20% greater than C→T activity. In another embodiment, a dual editor has A→G activity that is no more than about 10% or 20% less than C→T activity. In some embodiments, the adenosine deaminase variant has predominantly cytosine deaminase activity, and little, if any, adenosine deaminase activity. In some embodiments, the adenosine deaminase variant has cytosine deaminase activity, and no significant or no detectable adenosine deaminase activity.

[0171] By “effective amount” is meant the amount of an agent (e.g., a base editor, cell, such as a CAR-T cell) as described herein, that is required to ameliorate the symptoms of a disease relative to an untreated patient or an individual without disease, i.e., a healthy individual, or is the amount of the agent sufficient to elicit a desired biological response. The effective amount of active compound(s) used to practice embodiments of the present disclosure for therapeutic treatment of a disease varies depending upon the manner of administration, the age, body weight, and general health of the subject. Ultimately, the attending physician or veterinarian will decide the appropriate amount and dosage regimen. Such amount is referred to as an “effective” amount. In one embodiment, an effective amount is the amount of a base editor of the disclosure sufficient to introduce an alteration in a gene of interest in a cell (e.g., a cell in vitro or in vivo). In one embodiment, an effective amount is the amount of a base editor required to achieve a therapeutic effect. Such therapeutic effect need not be sufficient to alter a pathogenic gene in all cells of a subject, tissue or organ, but only to alter the pathogenic gene in about 1%, 5%, 10%, 25%, 50%, 75% or more of the cells present in a subject, tissue or organ. In one embodiment, an effective amount is sufficient to ameliorate one or more symptoms of a disease.

[0172] By “exhaustion” or “exhausted phenotype” is meant a condition in which an immune effector cell exhibits a reduction in capacity to effect an immune response. In embodiments, an exhausted immune cells shows a reduction in cytotoxicity, antitumor properties, proliferation, and/or cytokine production relative to a reference cell, such as a resting immune effector cell (e.g., a CAR-T cell not repeated or continuously exposed to an antigen). In some cases, exhaustion is associated with upregulation of repressor genes, increase in inhibitory receptors, reduction in quantity of immune effector cells, and/or reduced survival relative to a reference cell, such as a resting immune effector cell (e.g., a CAR-T cell not repeated or continuously exposed to an antigen). In some instances, the immune response is the killing of a cell expressing a target antigen. An immune effector cell can develop an exhausted phenotype when stimulated by a target antigen multiple times or continuously (see, e.g., FIG. 3A). In some cases, an exhausted immune effector cell shows reduced production of a cytokine selected from GZMB; IFNg; IL-2; and TNFa relative to a reference cell. In some instances, an exhausted immune effector cell shows reduced levels of activation relative to a reference cell, as indicated by reduced levels of CD25 expression. In some cases, an exhausted immune cell shows increased levels of EOMES and/or reduced levels of T-bet relative to a reference cell, or a reduction in Ki67 levels relative to a reference cell. The exhausted phenotype is epigenetically reinforced. Immune effector cell exhaustion is described further in Jiang, et al., “T-cell exhaustion in the tumor microenvironment,” Cell Death and Disease, 6:e1792 (2015), the disclosure of which is incorporated herein in its entirety by reference for all purposes.

[0173] By “fragment” is meant a portion of a polypeptide or nucleic acid molecule. This portion contains, at least about 10%, 20%, 30%, 40%, 50%, 60%, 70%, 80%, or 90% of the entire length of the reference nucleic acid molecule or polypeptide. A fragment may contain 10, 20, 30, 40, 50, 60, 70, 80, 90, or 100, 200, 300, 400, 500, 600, 700, 800, 900, or 1000 nucleotides or amino acids. In some embodiments, the fragment is a functional fragment.

[0174] By “guide polynucleotide” is meant a polynucleotide or polynucleotide complex which is specific for a target sequence and can form a complex with a polynucleotide programmable nucleotide binding domain protein (e.g., Cas9 or Cpf1). In an embodiment, the guide polynucleotide is a guide RNA (gRNA). gRNAs can exist as a complex of two or more RNAs, or as a single RNA molecule.

[0175] “Hybridization” means hydrogen bonding, which may be Watson-Crick, Hoogsteen or reversed Hoogsteen hydrogen bonding, between complementary nucleobases. For example, adenine and thymine are complementary nucleobases that pair through the formation of hydrogen bonds.

[0176] By “immune cell” is meant a cell of the immune system capable of generating an immune response. Exemplary immune cells include, but are not limited to, T cells, NK cells, B cells, macrophages, hematopoietic stem cells, or precursors thereof. In embodiments, an immune cell is allogeneic to a subject to whom the cell is to be administered. In embodiments, an immune cell is from a donor and is allogeneic to a subject to which the immune cell will be administered after being modified according to the methods provided herein. The disclosure features methods for preparing modified allogeneic immune cells with improved characteristics (e.g., increased persistence in a subject) as well as the cells produced by these methods.

[0177] By “immune effector cell” is meant a lymphocyte, once activated, capable of effecting an immune response upon a target cell. In some embodiments, immune effector cells are effector T cells. In some embodiments, the effector T cell is a naïve CD8⁺ T cell, a cytotoxic T cell, a natural killer T (NKT) cell, a macrophage, a natural killer (NK) cell, or a regulatory T (Treg) cell. In some embodiments, immune effector cells are effector NK cells. In some embodiments, the effector T cells are thymocytes, immature T lymphocytes, mature T lymphocytes, resting T lymphocytes, or activated T lymphocytes. In some embodiments the immune effector cell is a CD4⁺ CD8⁺ T cell or a CD4⁻ CD8⁻ T cell. In some embodiments the immune effector cell is a T helper cell. In some embodiments the T helper cell is a T helper 1 (Th1), a T helper 2 (Th2) cell, or a helper T cell expressing CD4 (CD4+ T cell).

[0178] By “immunomodulatory activity” is meant increasing, decreasing, or sustaining an immune response.

[0179] By “increases” is meant a positive alteration of at least 10%, 25%, 50%, 75%, or 100%, or about 1.5 fold, about 2 fold, about 3-fold, about 4-fold, about 5-fold, about 6-fold, about 7-fold, about 8-fold, about 9-fold, about 10-fold, about 15-fold, about 20-fold, about 25-fold, about 30-fold, about 35-fold, about 40-fold, about 45-fold, about 50-fold, or about 100-fold.

[0180] The terms “inhibitor of base repair”, “base repair inhibitor”, “IBR” or their grammatical equivalents refer to a protein that is capable in inhibiting the activity of a nucleic acid repair enzyme, for example a base excision repair enzyme.

[0181] An “intein” is a fragment of a protein that is able to excise itself and join the remaining fragments (the exteins) with a peptide bond in a process known as protein splicing.

[0182] The terms “isolated,” “purified,” or “biologically pure” refer to material that is free to varying degrees from components which normally accompany it as found in its native state. “Isolate” denotes a degree of separation from original source or surroundings. “Purify” denotes a degree of separation that is higher than isolation. A “purified” or “biologically pure” protein is sufficiently free of other materials such that any impurities do not materially affect the biological properties of the protein or cause other adverse consequences. That is, a nucleic acid or peptide of this disclosure is purified if it is substantially free of cellular material, viral material, or culture medium when produced by recombinant DNA techniques, or chemical precursors or other chemicals when chemically synthesized. Purity and homogeneity are typically determined using analytical chemistry techniques, for example, polyacrylamide gel electrophoresis or high performance liquid chromatography. The term “purified” can denote that a nucleic acid or protein gives rise to essentially one band in an electrophoretic gel. For a protein that can be subjected to modifications, for example, phosphorylation or glycosylation, different modifications may give rise to different isolated proteins, which can be separately purified.

[0183] By “isolated polynucleotide” is meant a nucleic acid molecule that is free of the genes which, in the naturally-occurring genome of the organism from which the nucleic acid molecule of the disclosure is derived, flank the gene. The term therefore includes, for example, a recombinant DNA that is incorporated into a vector; into an autonomously replicating plasmid or virus; or into the genomic DNA of a prokaryote or eukaryote; or that exists as a separate molecule (for example, a cDNA or a genomic or cDNA fragment produced by PCR or restriction endonuclease digestion) independent of other sequences. In addition, the term includes an RNA molecule that is transcribed from a DNA molecule, as well as a recombinant DNA that is part of a hybrid gene encoding additional polypeptide sequence.

[0184] By an “isolated polypeptide” is meant a polypeptide of the disclosure that has been separated from components that naturally accompany it. Typically, the polypeptide is isolated when it is at least 60%, by weight, free from the proteins and naturally-occurring organic molecules with which it is naturally associated. In some embodiments, the preparation is at least 75%, at least 90%, or at least 99%, by weight, a polypeptide of the disclosure. An isolated polypeptide of the disclosure may be obtained, for example, by extraction from a natural source, by expression of a recombinant nucleic acid encoding such a polypeptide; or by chemically synthesizing the protein. Purity can be measured by any appropriate method, for example, column chromatography, polyacrylamide gel electrophoresis, or by HPLC analysis.

[0185] The term “linker”, as used herein, refers to a molecule that links two moieties. In one embodiment, the term “linker” refers to a covalent linker (e.g., covalent bond) or a non-covalent linker.

[0186] By “marker” is meant any agent or clinical parameter having an alteration that is associated with a disease or disorder. In embodiments, the agent is a polypeptide or polynucleotide and the alteration is in expression, level, structure, or activity. In embodiments, the disease or disorder is a neoplasia, such as a hematologic cancer (e.g., a lymphoma). A non-limiting examples of a markers include CD5, CD7, CD19, CD20, CD22, CD79B, and ROR1.

[0187] The term “mutation,” as used herein, refers to a substitution of a residue within a sequence, e.g., a nucleic acid or amino acid sequence, with another residue, or a deletion or insertion of one or more residues within a sequence. Mutations are typically described herein by identifying the original residue followed by the position of the residue within the sequence and by the identity of the newly substituted residue. Various methods for making the amino acid substitutions (mutations) provided herein are well known in the art, and are provided by, for example, Green and Sambrook, Molecular Cloning: A Laboratory Manual (4^{th} ed., Cold Spring Harbor Laboratory Press, Cold Spring Harbor, N.Y. (2012)).

[0188] “Neoplasia” refers to cells or tissues exhibiting abnormal growth or proliferation. The term neoplasia encompasses cancer, liquid, and solid tumors. In some embodiments, the neoplasia is a solid tumor. In other embodiments, the neoplasia is a liquid tumor. In some embodiments, the neoplasia is a hematological cancer. In some embodiments, the hematological cancer is leukemia, myeloma, and/or lymphoma. In some embodiments, the hematological cancer is a B cell cancer (e.g., a B cell lymphoma). In some embodiments, the B cell cancer is a lymphoma or a leukemia. In some cases, the leukemia comprises a pre-leukemia. In some instances, the neoplasia is a mantle cell lymphoma. In some cases, the leukemia is an acute leukemia. Acute leukemias include, for example, an acute myeloid leukemia (AML). Acute leukemias also include, for example, an acute lymphoid leukemia or an acute lymphocytic leukemia (ALL); ALL includes B-lineage ALL; T-lineage ALL; and T-cell acute lymphocytic leukemia (T-ALL).

[0189] The terms “nucleic acid” and “nucleic acid molecule,” as used herein, refer to a compound comprising a nucleobase and an acidic moiety, e.g., a nucleoside, a nucleotide, or a polymer of nucleotides. Typically, polymeric nucleic acids, e.g., nucleic acid molecules comprising three or more nucleotides are linear molecules, in which adjacent nucleotides are linked to each other via a phosphodiester linkage. In some embodiments, “nucleic acid” refers to individual nucleic acid residues (e.g. nucleotides and/or nucleosides). In some embodiments, “nucleic acid” refers to an oligonucleotide chain comprising three or more individual nucleotide residues. As used herein, the terms “oligonucleotide” and “polynucleotide” can be used interchangeably to refer to a polymer of nucleotides (e.g., a string of at least three nucleotides). In some embodiments, “nucleic acid” encompasses RNA as well as single and/or double-stranded DNA. Nucleic acids may be naturally occurring, for example, in the context of a genome, a transcript, an mRNA, tRNA, rRNA, siRNA, snRNA, a plasmid, cosmid, chromosome, chromatid, or other naturally occurring nucleic acid molecule. On the other hand, a nucleic acid molecule may be a non-naturally occurring molecule, e.g., a recombinant DNA or RNA, an artificial chromosome, an engineered genome, or fragment thereof, or a synthetic DNA, RNA, DNA/RNA hybrid, or including non-naturally occurring nucleotides or nucleosides. Furthermore, the terms “nucleic acid,” “DNA,” “RNA,” and/or similar terms include nucleic acid analogs, e.g., analogs having other than a phosphodiester backbone. Nucleic acids can be purified from natural sources, produced using recombinant expression systems and optionally purified, chemically synthesized, etc. Where appropriate, e.g., in the case of chemically synthesized molecules, nucleic acids comprise nucleoside analogs such as analogs having chemically modified bases or sugars, and backbone modifications. A nucleic acid sequence is presented in the 5′ to 3′ direction unless otherwise indicated. In some embodiments, a nucleic acid is or comprises natural nucleosides (e.g. adenosine, thymidine, guanosine, cytidine, uridine, deoxyadenosine, deoxythymidine, deoxyguanosine, and deoxycytidine); nucleoside analogs (e.g., 2-aminoadenosine, 2-thiothymidine, inosine, pyrrolo-pyrimidine, 3-methyl adenosine, 5-methylcytidine, 2-aminoadenosine, C5-bromouridine, C5-fluorouridine, C5-iodouridine, C5-propynyl-uridine, C5-propynyl-cytidine, C5-methylcytidine, 2-aminoadenosine, 7-deazaadenosine, 7-deazaguanosine, 8-oxoadenosine, 8-oxoguanosine, O(6)-methylguanine, and 2-thiocytidine); chemically modified bases; biologically modified bases (e.g., methylated bases); intercalated bases; modified sugars (e.g., 2′-fluororibose, ribose, 2′-deoxyribose, arabinose, and hexose); and/or modified phosphate groups (e.g., phosphorothioates and 5′-N-phosphoramidite linkages).

[0190] The term “nuclear localization sequence,” “nuclear localization signal,” or “NLS” refers to an amino acid sequence that promotes import of a protein into the cell nucleus. Nuclear localization sequences are known in the art and described, for example, in Plank et al., International PCT application, PCT/EP2000/011690, filed Nov. 23, 2000, published as WO/2001/038547 on May 31, 2001, the contents of which are incorporated herein by reference for their disclosure of exemplary nuclear localization sequences. In other embodiments, the NLS is an optimized NLS described, for example, by Koblan et al., Nature Biotech. 2018 doi:10.1038/nbt.4172. In some embodiments, an NLS comprises the amino acid sequence KRTADGSEFESPKKKRKV (SEQ ID NO: 190), KRPAATKKAGQAKKKK (SEQ ID NO: 191), KKTELQTTNAENKTKKL (SEQ ID NO: 192), KRGINDRNFWRGENGRKTR (SEQ ID NO: 193), RKSGKIAAIVVKRPRK (SEQ ID NO: 194), PKKKRKV (SEQ ID NO: 195), MDSLLMNRRKFLYQFKNVRWAKGRRETYLC (SEQ ID NO: 196), PKKKRKVEGADKRTADGSEFESPKKKRKV (SEQ ID NO: 328), or RKSGKIAAIVVKRPRKPKKKRKV (SEQ ID NO: 329).

[0191] The term “nucleobase,” “nitrogenous base,” or “base,” used interchangeably herein, refers to a nitrogen-containing biological compound that forms a nucleoside, which in turn is a component of a nucleotide. The ability of nucleobases to form base pairs and to stack one upon another leads directly to long-chain helical structures such as ribonucleic acid (RNA) and deoxyribonucleic acid (DNA). Five nucleobases—adenine (A), cytosine (C), guanine (G), thymine (T), and uracil (U)—are called primary or canonical. Adenine and guanine are derived from purine, and cytosine, uracil, and thymine are derived from pyrimidine. DNA and RNA can also contain other (non-primary) bases that are modified. Non-limiting exemplary modified nucleobases can include hypoxanthine, xanthine, 7-methylguanine, 5,6-dihydrouracil, 5-methylcytosine (m5C), and 5-hydromethylcytosine. Hypoxanthine and xanthine can be created through mutagen presence, both of them through deamination (replacement of the amine group with a carbonyl group). Hypoxanthine can be modified from adenine. Xanthine can be modified from guanine. Uracil can result from deamination of cytosine. A “nucleoside” consists of a nucleobase and a five carbon sugar (either ribose or deoxyribose). Examples of a nucleoside include adenosine, guanosine, uridine, cytidine, 5-methyluridine (m5U), deoxyadenosine, deoxyguanosine, thymidine, deoxyuridine, and deoxycytidine. Examples of a nucleoside with a modified nucleobase includes inosine (I), xanthosine (X), 7-methylguanosine (m7G), dihydrouridine (D), 5-methylcytidine (m5C), and pseudouridine (Ψ). A “nucleotide” consists of a nucleobase, a five carbon sugar (either ribose or deoxyribose), and at least one phosphate group. Non-limiting examples of modified nucleobases and/or chemical modifications that a modified nucleobase may include are the following: pseudo-uridine, 5-Methyl-cytosine, 2′-O-methyl-3′-phosphonoacetate, 2′-O-methyl thioPACE (MSP), 2′-O-methyl-PACE (MP), 2′-fluoro RNA (2′-F-RNA), constrained ethyl (S-cEt), 2′-O-methyl (‘M’), 2′-O-methyl-3′-phosphorothioate (‘MS’), 2′-O-methyl-3′-thiophosphonoacetate (‘MSP’), 5-methoxyuridine, phosphorothioate, and N1-Methylpseudouridine.

[0192] The term “nucleic acid programmable DNA binding protein” or “napDNAbp” may be used interchangeably with “polynucleotide programmable nucleotide binding domain” to refer to a protein that associates with a nucleic acid (e.g., DNA or RNA), such as a guide nucleic acid or guide polynucleotide (e.g., gRNA), that guides the napDNAbp to a specific nucleic acid sequence. In some embodiments, the polynucleotide programmable nucleotide binding domain is a polynucleotide programmable DNA binding domain. In some embodiments, the polynucleotide programmable nucleotide binding domain is a polynucleotide programmable RNA binding domain. In some embodiments, the polynucleotide programmable nucleotide binding domain is a Cas9 protein. A Cas9 protein can associate with a guide RNA that guides the Cas9 protein to a specific DNA sequence that is complementary to the guide RNA. In some embodiments, the napDNAbp is a Cas9 domain, for example a nuclease active Cas9, a Cas9 nickase (nCas9), or a nuclease inactive Cas9 (dCas9). Non-limiting examples of nucleic acid programmable DNA binding proteins include, Cas9 (e.g., dCas9 and nCas9), Cas12a/Cpf1, Cas12b/C2cl, Cas12c/C2c3, Cas12d/CasY, Cas12e/CasX, Cas12g, Cas12h, Cas12i, and Cas12j/CasΦ (Cas12j/Casphi). Non-limiting examples of Cas enzymes include Cas1, Cas1B, Cas2, Cas3, Cas4, Cas5, Cas5d, Cas5t, Cas5h, Cas5a, Cas6, Cas7, Cas8, Cas8a, Cas8b, Cas8c, Cas9 (also known as Csn1 or Csx12), Cas10, Cas10d, Cas12a/Cpf1, Cas12b/C2cl, Cas12c/C2c3, Cas12d/CasY, Cas12e/CasX, Cas12g, Cas12h, Cas12i, Cas12j/CasΦ, Cpf1, Csy1, Csy2, Csy3, Csy4, Cse1, Cse2, Cse3, Cse4, Cse5e, Csc1, Csc2, Csa5, Csn1, Csn2, Csm1, Csm2, Csm3, Csm4, Csm5, Csm6, Cmr1, Cmr3, Cmr4, Cmr5, Cmr6, Csb1, Csb2, Csb3, Csx17, Csx14, Csx10, Csx16, CsaX, Csx3, Csx1, Csx1S, Csx11, Csf1, Csf2, CsO, Csf4, Csd1, Csd2, Cst1, Cst2, Csh1, Csh2, Csa1, Csa2, Csa3, Csa4, Csa5, Type II Cas effector proteins, Type V Cas effector proteins, Type VI Cas effector proteins, CARF, DinG, homologues thereof, or modified or engineered versions thereof. Other nucleic acid programmable DNA binding proteins are also within the scope of this disclosure, although they may not be specifically listed in this disclosure. See, e.g., Makarova et al. “Classification and Nomenclature of CRISPR-Cas Systems: Where from Here?” CRISPR J. 2018 October; 1:325-336. doi: 10.1089/crispr.2018.0033; Yan et al., “Functionally diverse type V CRISPR-Cas systems” Science. 2019 Jan. 4; 363(6422):88-91. doi: 10.1126/science.aav7271, the entire contents of each are hereby incorporated by reference. Exemplary nucleic acid programmable DNA binding proteins and nucleic acid sequences encoding nucleic acid programmable DNA binding proteins are provided in the Sequence Listing as SEQ ID NOs: 197-231, 232-245, 254-257, 260, and 378. In some embodiments, the napDNAbp is a (CRISPR-associated system) Cas9 endonuclease, for example, Cas9 (Csn1) from Streptococcus pyogenes (e.g., SEQ ID NO: 197), Cas9 from Neisseria meningitidis (NmeCas9; SEQ ID NO: 208), Nme2Cas9 (SEQ ID NO: 209), Streptococcus constellatus (ScoCas9), or derivatives thereof (e.g., a sequence with at least about 85% sequence identity to a Cas9, such as Nme2Cas9 or spCas9).

[0193] The terms “nucleobase editing domain” or “nucleobase editing protein,” as used herein, refers to a protein or enzyme that can catalyze a nucleobase modification in RNA or DNA, such as cytosine (or cytidine) to uracil (or uridine) or thymine (or thymidine), and adenine (or adenosine) to hypoxanthine (or inosine) deaminations, as well as non-templated nucleotide additions and insertions. In some embodiments, the nucleobase editing domain is a deaminase domain (e.g., an adenine deaminase or an adenosine deaminase; or a cytidine deaminase or a cytosine deaminase).

[0194] As used herein, “obtaining” as in “obtaining an agent” includes synthesizing, purchasing, or otherwise acquiring the agent.

[0195] By “subject” or “patient” is meant a mammal, including, but not limited to, a human or non-human mammal. In embodiments, the mammal is a bovine, equine, canine, ovine, rabbit, rodent, nonhuman primate, or feline. In an embodiment, “patient” refers to a mammalian subject with a higher than average likelihood of developing a disease or a disorder. Exemplary patients can be humans, non-human primates, cats, dogs, pigs, cattle, cats, horses, camels, llamas, goats, sheep, rodents (e.g., mice, rabbits, rats, or guinea pigs) and other mammalians that can benefit from the therapies disclosed herein. Exemplary human patients can be male and/or female.

[0196] “Patient in need thereof” or “subject in need thereof” is referred to herein as a patient diagnosed with, at risk or having, predetermined to have, or suspected of having a disease or disorder.

[0197] The terms “pathogenic mutation”, “pathogenic variant”, “disease causing mutation”, “disease causing variant”, “deleterious mutation”, or “predisposing mutation” refers to a genetic alteration or mutation that is associated with a disease or disorder or that increases an individual's susceptibility or predisposition to a certain disease or disorder. In some embodiments, the pathogenic mutation comprises at least one wild-type amino acid substituted by at least one pathogenic amino acid in a protein encoded by a gene. In some embodiments, the pathogenic mutation is in a terminating region (e.g., stop codon). In some embodiments, the pathogenic mutation is in a non-coding region (e.g., intron, promoter, etc.).

[0198] By “persistence” in the context of an allogeneic transplant is meant the continued survival of a donor cell in a host organism. In some embodiments, allogeneic cell(s) comprising one or more of the edits described herein (e.g., a base edit in a CD5, CD3e, CD3g, B2M, and/or CHTA gene, or regulatory element(s) thereof; or knockdown of a CD5, TCRαβ, B2M, and/or CIITA polypeptide) persist in a subject allogeneic to the cells at higher levels over time post-infusion than corresponding unedited allogeneic control cells. In embodiments, the percentage of edited cells (e.g., T cells, NK cells, or lymphocytes) persisting in a subject at a given time point (e.g., 7 days, 14 days, 1 month, 3 months, 6 months, 9 months, or greater than 1, 2, or 3 years is at least about 10%, 15%, 20%, 25%, 30%, 35%, 40%, 45%, 50%, 60%, 70%, 80%, 90%, 95%, 99%, or 100% greater than the level of unedited control cells at the same time point. A cell(s) modified by methods of the present disclosure are more persistent than a reference unmodified cell(s).

[0199] The terms “protein”, “peptide”, “polypeptide”, and their grammatical equivalents are used interchangeably herein, and refer to a polymer of amino acid residues linked together by peptide (amide) bonds. A protein, peptide, or polypeptide can be naturally occurring, recombinant, or synthetic, or any combination thereof.

[0200] The term “fusion protein” as used herein refers to a hybrid polypeptide, which comprises protein domains from at least two different proteins.

[0201] The term “recombinant” as used herein in the context of proteins or nucleic acids refers to proteins or nucleic acids that do not occur in nature, but are the product of human engineering. For example, in some embodiments, a recombinant protein or nucleic acid molecule comprises an amino acid or nucleotide sequence that comprises at least one, at least two, at least three, at least four, at least five, at least six, or at least seven mutations as compared to any naturally occurring sequence.

[0202] By “reduces” is meant a negative alteration of at least 5%, 10%, 15%, 25%, 30%, 35%, 40%, 45% 50%, 55%, 60%, 65%, 70%, 75%, 80%, 85%, 90%, 95%, or 100%.

[0203] By “reference” is meant a standard or control condition. In one embodiment, the reference is a wild-type cell not base edited according to the methods provided herein or healthy cell. In other embodiments and without limitation, a reference is an untreated cell that is not subjected to a test condition, or is subjected to placebo or normal saline, medium, buffer, a control polynucleotide that does not encode a polypeptide of interest, and/or a control vector that does not harbor a polynucleotide of interest. In some cases, a reference is a healthy subject, such as a subject not having a neoplasia. In some embodiments, the reference is a cell lacking a nucleobase alteration and/or having an additional nucleobase alteration. The reference may be a cell that does not express one or more of the polypeptides described herein. The reference may be a subject before administration of a composition provided herein or treated according to a method provided herein and/or the subject before a change in a treatment (e.g., an alteration in dose or agent administered to the subject). A reference may be an antigen-naïve immune effector cell that has not previously or recently (e.g., within 1 hour, 2 hours, 3 hours, 4 hours, 5 hours, 6 hours, 12 hours, 1 day, 2 days, 3 days, 4 days, 5 days, 6 days, 7 days, one month, or longer) been stimulated by an antigen, that has not been continuously stimulated by an antigen, and/or that has not been repeatedly stimulated by an antigen (e.g., 1, 2, 3, 4, 5, 6, 7, 8, 9, or 10 times according to the method shown in FIG. 3A, or to a modified version of the method).

[0204] A “reference sequence” is a defined sequence used as a basis for sequence comparison. A reference sequence may be a subset of or the entirety of a specified sequence; for example, a segment of a full-length cDNA or gene sequence, or the complete cDNA or gene sequence. For polypeptides, the length of the reference polypeptide sequence will generally be at least about 16 amino acids, at least about 20 amino acids, at least about 25 amino acids, about 35 amino acids, about 50 amino acids, or about 100 amino acids. For nucleic acids, the length of the reference nucleic acid sequence will generally be at least about 50 nucleotides, at least about 60 nucleotides, at least about 75 nucleotides, about 100 nucleotides or about 300 nucleotides or any integer thereabout or therebetween. In some embodiments, a reference sequence is a wild-type sequence of a protein of interest. In other embodiments, a reference sequence is a polynucleotide sequence encoding a wild-type protein.

[0205] The term “RNA-programmable nuclease,” and “RNA-guided nuclease” refer to a nuclease that forms a complex with (e.g., binds or associates with) one or more RNA(s) that is not a target for cleavage. In some embodiments, an RNA-programmable nuclease, when in a complex with an RNA, may be referred to as a nuclease-RNA complex. Typically, the bound RNA(s) is referred to as a guide RNA (gRNA). In some embodiments, the RNA-programmable nuclease is the (CRISPR-associated system) Cas9 endonuclease, for example, Cas9 (Csn1) from Streptococcus pyogenes (e.g., SEQ ID NO: 197), Cas9 from Neisseria meningitidis (NmeCas9; SEQ ID NO: 208), Nme2Cas9 (SEQ ID NO: 209), Streptococcus constellatus (ScoCas9), or derivatives thereof (e.g. a sequence with at least about 85% sequence identity to a Cas9, such as Nme2Cas9 or spCas9).

[0206] As used herein, the term “scFv” refers to a single chain Fv antibody in which the variable domains of the heavy chain and the light chain from an antibody have been joined to form one chain. scFv fragments contain a single polypeptide chain that includes the variable region of an antibody light chain (VL) (e.g., CDR-L1, CDR-L2, and/or CDR-L3) and the variable region of an antibody heavy chain (VH) (e.g., CDR-H1, CDR-H2, and/or CDR-H3) separated by a linker. The linker that joins the VL and VH regions of a scFv fragment can be a peptide linker composed of proteinogenic amino acids. Alternative linkers can be used to so as to increase the resistance of the scFv fragment to proteolytic degradation (for example, linkers containing D-amino acids), in order to enhance the solubility of the scFv fragment (for example, hydrophilic linkers such as polyethylene glycol-containing linkers or polypeptides containing repeating glycine and serine residues), to improve the biophysical stability of the molecule (for example, a linker containing cysteine residues that form intramolecular or intermolecular disulfide bonds), or to attenuate the immunogenicity of the scFv fragment (for example, linkers containing glycosylation sites). It will also be understood by one of ordinary skill in the art that the variable regions of the scFv molecules described herein can be modified such that they vary in amino acid sequence from the antibody molecule from which they were derived. For example, nucleotide or amino acid substitutions leading to conservative substitutions or changes at amino acid residues can be made (e.g., in CDR and/or framework residues) so as to preserve or enhance the ability of the scFv to bind to the antigen recognized by the corresponding antibody.

[0207] By “specifically binds” is meant a nucleic acid molecule, polypeptide, polypeptide/polynucleotide complex, compound, or molecule that recognizes and binds a polypeptide and/or nucleic acid molecule of the disclosure, but which does not substantially recognize and bind other molecules in a sample, for example, a biological sample.

[0208] By “substantially identical” is meant a polypeptide or nucleic acid molecule exhibiting at least 50% identity to a reference amino acid sequence. In one embodiment, a reference sequence is a wild-type amino acid or nucleic acid sequence. In another embodiment, a reference sequence is any one of the amino acid or nucleic acid sequences described herein. In one embodiment, such a sequence is at least about 60%, 80%, 85%, 90%, 95%, 96%, 97%, 98%, 99%, 99.9%, or even 99.99%, identical at the amino acid level or nucleic acid level to the sequence used for comparison.

[0209] Sequence identity is typically measured using sequence analysis software (for example, Sequence Analysis Software Package of the Genetics Computer Group, University of Wisconsin Biotechnology Center, 1710 University Avenue, Madison, Wis. 53705, BLAST, BESTFIT, GAP, or PILEUP/PRETTYBOX programs). Such software matches identical or similar sequences by assigning degrees of homology to various substitutions, deletions, and/or other modifications. Conservative substitutions typically include substitutions within the following groups: glycine, alanine; valine, isoleucine, leucine; aspartic acid, glutamic acid, asparagine, glutamine; serine, threonine; lysine, arginine; and phenylalanine, tyrosine.

[0210] Nucleic acid molecules useful in the methods of the disclosure include any nucleic acid molecule that encodes a polypeptide of the disclosure or a functional fragment thereof. Such nucleic acid molecules need not be 100% identical with an endogenous nucleic acid sequence, but will typically exhibit substantial identity. Polynucleotides having “substantial identity” to an endogenous sequence are typically capable of hybridizing with at least one strand of a double-stranded nucleic acid molecule. Nucleic acid molecules useful in the methods of the disclosure include any nucleic acid molecule that encodes a polypeptide of the disclosure or a functional fragment thereof. Such nucleic acid molecules need not be 100% identical with an endogenous nucleic acid sequence, but will typically exhibit substantial identity. Polynucleotides having “substantial identity” to an endogenous sequence are typically capable of hybridizing with at least one strand of a double-stranded nucleic acid molecule. By “hybridize” is meant pair to form a double-stranded molecule between complementary polynucleotide sequences (e.g., a gene described herein), or portions thereof, under various conditions of stringency. (See, e.g., Wahl, G. M. and S. L. Berger (1987) Methods Enzymol. 152:399; Kimmel, A. R. (1987) Methods Enzymol. 152:507).

[0211] By “split” is meant divided into two or more fragments.

[0212] A “split polypeptide” or “split protein” refers to a protein that is provided as an N-terminal fragment and a C-terminal fragment translated as two separate polypeptides from a nucleotide sequence(s). The polypeptides corresponding to the N-terminal portion and the C-terminal portion of the split protein may be spliced in some embodiments to form a “reconstituted” protein. In some embodiments, the split polypeptide is a nucleic acid programmable DNA binding protein (e.g., a Cas9) or a base editor.

[0213] The term “target site” refers to a nucleotide sequence or nucleobase of interest within a nucleic acid molecule that is modified. In embodiments, the modification is deamination of a base. The deaminase can be a cytidine or an adenine deaminase. The fusion protein or base editing complex comprising a deaminase may comprise a dCas9-adenosine deaminase fusion protein, a Cas12b-adenosine deaminase fusion, or a base editor disclosed herein.

[0214] As used herein, the terms “treat,” treating,” “treatment,” and the like refer to reducing or ameliorating a disorder and/or symptoms associated therewith or obtaining a desired pharmacologic and/or physiologic effect. It will be appreciated that, although not precluded, treating a disorder or condition does not require that the disorder, condition or symptoms associated therewith be completely eliminated. In some embodiments, the effect is therapeutic, i.e., without limitation, the effect partially or completely reduces, diminishes, abrogates, abates, alleviates, reduces the intensity of, or cures a disease and/or adverse symptom attributable to the disease. In some embodiments, the effect is preventative, i.e., the effect protects or prevents an occurrence or reoccurrence of a disease or condition. To this end, the presently disclosed methods comprise administering a therapeutically effective amount of a composition as described herein.

[0215] By “uracil glycosylase inhibitor” or “UGI” is meant an agent that inhibits the uracil-excision repair system. Base editors comprising a cytidine deaminase convert cytosine to uracil, which is then converted to thymine through DNA replication or repair. In various embodiments, a uracil DNA glycosylase (UGI) prevent base excision repair which changes the U back to a C. In some instances, contacting a cell and/or polynucleotide with a UGI and a base editor prevents base excision repair which changes the U back to a C. An exemplary UGI comprises an amino acid sequence as follows:

>splP14739IUNGI_BPPB2 Uracil-DNA glycosylase
inhibitor
(SEQ ID NO: 231)
MTNLSDIIEKETGKQLVIQESILMLPEEVEEVIGNKPESDILVHTAYDE
STDENVMLLTSDAPEYKPWALVIQDSNGENKIKML.

[0216] In some embodiments, the agent inhibiting the uracil-excision repair system is a uracil stabilizing protein (USP). See, e.g., WO 2022015969 A1, incorporated herein by reference.

[0217] As used herein, the term “vector” refers to a means of introducing a nucleic acid molecule into a cell, resulting in a transformed cell. Vectors include plasmids, transposons, phages, viruses, liposomes, lipid nanoparticles, and episomes.

[0218] Ranges provided herein are understood to be shorthand for all of the values within the range. For example, a range of 1 to 50 is understood to include any number, combination of numbers, or sub-range from the group consisting 1, 2, 3, 4, 5, 6, 7, 8, 9, 10, 11, 12, 13, 14, 15, 16, 17, 18, 19, 20, 21, 22, 23, 24, 25, 26, 27, 28, 29, 30, 31, 32, 33, 34, 35, 36, 37, 38, 39, 40, 41, 42, 43, 44, 45, 46, 47, 48, 49, or 50.

[0219] The recitation of a listing of chemical groups in any definition of a variable herein includes definitions of that variable as any single group or combination of listed groups. The recitation of an embodiment for a variable or aspect herein includes that embodiment as any single embodiment or in combination with any other embodiments or portions thereof.

[0220] All terms are intended to be understood as they would be understood by a person skilled in the art. Unless defined otherwise, all technical and scientific terms used herein have the same meaning as commonly understood by one of ordinary skill in the art to which the disclosure pertains

[0221] In this application, the use of the singular includes the plural unless specifically stated otherwise. It must be noted that, as used in the specification, the singular forms “a,” “an” and “the” include plural referents unless the context clearly dictates otherwise. In this application, the use of “or” means “and/or” unless stated otherwise. Furthermore, use of the term “including” as well as other forms, such as “include”, “includes,” and “included,” is not limiting.

[0222] As used in this specification and claim(s), the words “comprising” (and any form of comprising, such as “comprise” and “comprises”), “having” (and any form of having, such as “have” and “has”), “including” (and any form of including, such as “includes” and “include”) or “containing” (and any form of containing, such as “contains” and “contain”) are inclusive or open-ended. This wording indicates that specified elements, features, components, and/or method steps are present, but does not exclude the presence of other elements, features, components, and/or method steps. Any embodiments specified as “comprising” a particular component(s) or element(s) are also contemplated as “consisting of” or “consisting essentially of” the particular component(s) or element(s) in some embodiments. It is contemplated that any embodiment discussed in this specification can be implemented with respect to any method or composition of the present disclosure, and vice versa. Furthermore, compositions of the present disclosure can be used to achieve methods of the present disclosure.

[0223] The term “about” or “approximately” means within an acceptable error range for the particular value as determined by one of ordinary skill in the art, which will depend in part on how the value is measured or determined, i.e., the limitations of the measurement system.

[0224] Reference in the specification to “some embodiments,” “an embodiment,” “one embodiment” or “other embodiments” means that a particular feature, structure, or characteristic described in connection with the embodiments is included in at least some embodiments, but not necessarily all embodiments, of the present disclosures.

### BRIEF DESCRIPTION OF THE DRAWINGS

[0225] FIG. 1 provides a schematic diagram showing a summary of non-limiting embodiments of improved characteristics of immune effector cells (e.g., chimeric antigen receptor expressing T cells (CAR-T cells)) prepared according to the methods provided herein, referenced in FIG. 1 as “Next-gen CAR-T cells,” relative to immune effector cells prepared according to alternative methods.

[0226] FIG. 2 provides a schematic diagram showing how persistent antigen stimulation can lead to chimeric antigen receptor (CAR) T cell dysfunction (e.g., reduced cytotoxicity, proliferation, and/or cytokine production; and/or increased expression of repressor genes and/or inhibitory receptors; and/or reduced survival) in the form of an exhausted phenotype. CAR-T cell dysfunction may be characterized by exhaustion of antitumor properties, rapid contraction in quantity, and/or restricted survival.

[0227] FIGS. 3A to 3C provide a schematic diagram, a plot, and a bar graph showing an in vitro model of repeated stimulation of chimeric antigen receptor (CAR) T cells by an antigen. FIG. 3A provides a schematic diagram showing an experimental protocol for repeatedly exposing CAR-T cells to an antigen. The cells were successfully transferred between antigen-coated plates, where each time the cells were contacted with a new antigen-coated plate was considered an individual instance of antigen exposure. Cells were contacted with new antigen-coated plates (i.e., exposed to antigen) between about 4 and 6 times prior to being characterized. In some cases, characterization of the cells involved measuring proliferation, measuring cytotoxicity, phenotyping, and/or measuring cytokine release. FIG. 3B provides a plot showing that CAR-T cells contacted with antigen multiple times according to the method shown in FIG. 3A showed impaired cytotoxicity when co-cultured with target cells (effector to target (E:T) ratio of 1:5) relative to CAR-T cells not exposed to antigen according to the method shown in FIG. 3A (i.e., resting CAR-T cells). FIG. 3C provides a bar graph showing that CAR-T cells contacted with antigen multiple times according to the method shown in FIG. 3A showed reduced proliferative potential with repeated antigen exposures relative to CAR-T cells not exposed to antigen according to the method shown in FIG. 3A (i.e., resting CAR-T cells). In FIGS. 3B and 3C, “T cells” represents T cells that did not express a chimeric antigen receptor (CAR) and that were used to prepare the CAR-T cells evaluated. In FIGS. 3B and 3C the chimeric antigen receptors targeted a cluster of differentiation 19 (CD19) antigen, and the target cells (Nalm6 B cell precursor leukemia cells initiated from an adolescent male and that expressed green fluorescent protein (GFP)) surface-expressed CD19.

[0228] FIG. 4 provides a schematic diagram providing lists of representative polypeptides that function as negative regulators of immune cell (e.g., T cell) function, such as polypeptides that are involved in immune cell gene expression regulation, that are involved in immune cell receptor (TCR) or cytokine signaling, that are involved in immune cell growth and/or differentiation, or that are immune cell transcription factors. In embodiments, one or more genes encoding one or more of the polypeptides listed in FIG. 4 may be edited in an immune cell according to the methods provided herein to reduce or eliminate the expression of the encoded polypeptide(s) and to improve one or more characteristics of the immune cell (e.g., efficacy in killing tumor cells).

[0229] FIG. 5 provides a schematic diagram showing different types of base edits that may be used to knock-out expression of a polypeptide (i.e., disrupting a start codon, disrupting a splice donor or acceptor site, and/or introduction of a stop codon). In embodiments, a base edit used to reduce or eliminate expression of a polypeptide from a gene is located within a region of the gene corresponding to the first 10%, 25%, 50%, or 75% of the nucleotides transcribed from the gene.

[0230] FIG. 6 provides a series of Western blots showing that base editor systems containing the indicated guide polynucleotides (i.e., EF02, EF03, EF04, EF14, EF15, EF01, EF07, EF19, or EF20) (see Tables 1 and 2 for guide sequences) and ABE8.20m were effective in base editing polynucleotides in immune cells to reduce or eliminate expression of the indicated target polypeptides (i.e., CBLB, PTP1B, DNMT3A, CISH, SOCS1, or FLI-1). In FIG. 6, (3-actin was used as a reference.

[0231] FIG. 7 provides a plot and images showing that antigen-naïve chimeric antigen receptor (CAR) T cells maintained cytotoxic capacity after being base edited to reduce or eliminate expression of CISH, CBLB, PTP1B, SOCS1, Roquin-1, DNMT3A, FLI-1, Chop, or Regnase-1. In FIG. 7, “T cells” represents T cells that did not express a chimeric antigen receptor (CAR) and that were used to prepare the CAR-T cells evaluated. The immune effector cells (T cells or anti-CD19 CAR-T cells) were co-cultured with target cells (Nalm6 B cell precursor leukemia cells initiated from an adolescent male and that expressed green fluorescent protein (GFP)) at an effector to target cell ratio (E:T) of 1:5 and target cell proliferation was monitored over time by measuring GFP fluorescence/expression. The images of FIG. 7 are fluorescent microscopy images showing that the co-cultures containing the base edited CAR-T cells contained lower levels of tumor cells (i.e., Nalm6 cells) than co-cultures containing T cells (“T cells”) that did not express any chimeric antigen receptor.

[0232] FIGS. 8A to 8D provide plots and bar graphs showing that anti-CD19 CAR-T cells base edited to reduce or eliminate expression of CISH, CBLB, PTP1B, SOCS1, Roquin-1, DNMT3A, FLI-1, Chop, or Regnase-1 showed improved antigen-dependent expansion relative to unedited (WT) anti-CD19 CAR-T cells. FIG. 8A provides a plot showing antigen-dependent fold expansion of the indicated anti-CD19 CAR-T cells following antigen exposure at each of the indicated time points. FIG. 8B provides a bar graph showing cumulative fold expansion measurements corresponding to FIG. 8A. FIG. 8C provides a plot showing antigen-independent fold expansion of the indicated anti-CD19 CAR-T cells. FIG. 8D provides a bar graph showing cumulative fold expansion measurements corresponding to FIG. 8C.

[0233] FIGS. 9A to 9J provide plots and a bar graph showing that anti-CD19 chimeric antigen receptor (CAR) T cells base edited to reduce or eliminate expression of CISH, CBLB, PTP1B, SOCS1, Roquin-1, DNMT3A, FLI-1, Chop, or Regnase-1 showed higher levels of cytotoxicity after being exposed to antigen 4 times (see FIG. 3A) relative to unedited anti-CD19 CAR-T cells similarly exposed to antigen 4 times. The anti-CD19 CAR-T cells T cells not expressing any CAR were co-cultured with Nalm6 (B cell precursor leukemia cells initiated from an adolescent male) that expressed green fluorescent protein (GFP) at an effector to target cell (E:T) ratio of 1:5. The CAR-T cells were exposed to antigen four (4) times prior to being co-cultured with the target cells (Nalm6 cells). In each of FIGS. 9A to 9J, the base edited cells were edited to reduce or eliminate expression of the polypeptide indicated at the top of the plot. FIG. 9J provides a bar graph showing the area under the curves corresponding to the base edited CAR-T cells of each of FIGS. 9A to 9I, as indicated along the x-axis. In FIG. 9J, “CAR-T” indicates unedited anti-CD19 CAR-T cells. In FIGS. 9A to 9I, the term “GCU” indicates “green calibrated unit,” which is a measure of tumor growth and is proportional to levels of green fluorescent protein expressed by the target Nalm6 tumor cells. In FIGS. 9A to 9J, “T cells” represents T cells that did not express a chimeric antigen receptor (CAR) and that were used to prepare the CAR-T cells evaluated.

[0234] FIG. 10 provides a series of plots demonstrating that base editing of anti-CD19 CAR-T cells to reduce or eliminate expression of CISH, SOCS1, or Roquin-1 improved efficacy (e.g., cytotoxicity) of the CAR-T cells following repeated antigen exposures relative to unedited CAR-T cells regardless of the donor from which the CAR-T cells were derived. The anti-CD19 CAR-T cells were prepared using T cells collected from two different human subjects (Donor 1 and Donor 2). The upper plots of FIG. 10 correspond to CAR-T cells prepared using T cells from Donor 1 and the lower plots of FIG. 10 correspond to CAR-T cells prepared using T cells from Donor 2. The CAR-T cells were exposed to antigen four (4) times (see FIG. 3A) prior to being co-cultured with target cells (Nalm6 B cell precursor leukemia cells initiated from an adolescent male and that expressed green fluorescent protein (GFP)) at an effector to target cell ratio (E:T) of 1:5.

[0235] FIGS. 11A and 11B provide bar graphs showing that anti-CD19 CAR-T cells base edited according to the methods provided herein to reduce or eliminate expression of CISH, CBLB, SOCS1, Roquin-1, or DNMT3A showed improved T cell intrinsic phenotypes relative to unedited anti-CD19 CAR-T cells after repeated (four) exposures to CD19 antigen. FIG. 11A provides a bar graph showing that anti-CD19 CAR-T cells base edited to reduce or eliminate expression of the polypeptides indicated along the x-axis showed improved proliferation after repeated exposures to antigen, as indicated by lower-magnitude fold-changes in instances of the Ki67+ phenotype in the base edited CAR-T cells. The fold change in Ki67+ expression was measured relative to the cells prior to repeated exposures to antigen. In FIG. 11A, a higher negative value indicates less proliferation. FIG. 11B provides a bar graph showing reduced levels of the phenotype EOMES+, T-bet− in populations of anti-CD19 CAR-T cells base edited to reduce or eliminate expression of the polypeptides indicated along the x-axis after repeated antigen exposures. The phenotype EOMES+, T-bet− is associated with an exhausted phenotype (e.g., reduced cytotoxicity, reduced proliferation, reduced cytokine production, reduced survival, increase in inhibitory receptors, and/or upregulation of repressor genes) in T cells. In FIGS. 11A and 11B, “CAR-T” indicates anti-CD19 CAR-T cells that were not base edited. In FIGS. 11A and 11B, the anti-CD19 CAR-T cells were exposed to CD19 antigen four (4) times (see FIG. 3A).

[0236] FIGS. 12A to 12D provide bar graphs showing that anti-CD19 CAR-T cells base edited according to the methods provided herein to reduce or eliminate expression of CISH, SOCS1, or Roquin-1 maintained robust cytokine (e.g., GZMB, IL-2, IFNg, TNFa) secretion after repeated antigen exposures. The CAR-T cells were exposed to antigen four times (see FIG. 3A) prior to co-culturing the cells with target cells and subsequently measuring, in pg/mL, secretion of the cytokines granzyme B (GZMB; FIG. 12A), interferon gamma (IFNg; FIG. 12B), interleukin-2 (IL-2; FIG. 12C), and tumor necrosis factor alpha (TNFa; FIG. 12D). The CAR-T cells were co-cultured with target cells (Nalm6 B cell precursor leukemia cells initiated from an adolescent male and that expressed green fluorescent protein (GFP)) at an effector to target cell ratio (E:T) of 1:1. In FIGS. 12A to 12D, unedited CAR-T cells (CAR-T), unedited CAR-T cells cultured in the absence of target cells (CAR-T Alone), and target cells cultured in the absence of any CAR-T cells (Tumor Alone) were evaluated as controls. In each of FIGS. 12A to 12D, the dashed horizontal lines indicate levels of secretion measured for unedited CAR-T cells co-cultured with the target cells.

[0237] FIGS. 13A to 13D provide plots showing that base editing of anti-CD19 CAR-T cells according to the methods provided herein to reduce or eliminate expression of CISH, CBLB, SOCS1, Roquin-1, DNMT3A, FLI-1, CHOP, or Regnase-1 improved antitumor activity of the cells in vivo relative to unedited CAR-T cells. Anti-tumor activity of the CAR-T cells was evaluated using a sub-therapeutic B cell lymphoma (BCL) model involving the infusion of 5E5 Raji cells (a human B lymphoblastoid cell line derived from a patient with Burkitt lymphoma) expressing luciferase into mice at day zero (0) and subsequently infusing 1E6 CAR-T cells into the mice at day 1. FIGS. 13A to 13C provide plots showing measurements over time of tumor growth, measured as luciferase flux in photons per second (p/s), in mice administered the Raji cells and treated using anti-CD19 CAR-T cells base edited to knock-out (KO) expression of SOCS1, DNMT3A, or FLI-1, respectively. FIG. 13D provides a plot showing measurements over time of tumor growth, measured as luciferase flux in photons per second (p/s), in mice administered the Raji cells and treated using anti-CD19 CAR-T cells base edited to knock-out (KO) expression of CISH, CBLB, SOCS1, Roquin-1, DNMT3A, FLI-1, CHOP, or Regnase-1, as indicated. Knock out of FLP-1 expression, in particular, was effective in delaying tumor progression. In FIGS. 13A to 13D, the term “LV224” indicates unedited anti-CD19 CAR-T cells, the term “UTD,” which is short for “untransduced,” indicates T cells from which the CAR-T cells were derived but that do not express any chimeric antigen receptor (CAR), the term “Treatment” indicates the time at which mice were administered the CAR-T cells, and “Days Post Implant” indicates time in days measured from administration of the Raji cells to the mice.

[0238] FIGS. 14A and 14B provide a plot and images showing that base editing of anti-CD19 CAR-T cells according to the methods provided herein to reduce or eliminate expression of CISH, CBLB, SOCS1, Roquin-1, DNMT3A, FLI-1, RASA2, Regnase-1, CD5, or PTP1B improved antitumor activity of the cells in vivo relative to unedited CAR-T cells. Anti-tumor activity of the CAR-T cells was evaluated using a sub-therapeutic mantle cell lymphoma (MCL) model involving the infusion of 5E5 JeKo-1 cells (a mantle cell lymphoma (MCL) cell line isolated from the peripheral blood mononuclear cells of a 78-year-old female with a large cell variant of MCL showing leukemic conversion) expressing luciferase into mice at day zero (0) and subsequently infusing 2.5E5 CAR-T cells into the mice at day 7. FIG. 14A provides a plot showing measurements over time of tumor growth, measured as luciferase flux in photons per second (p/s), in mice administered the JeKo-1 cells and treated using anti-CD19 CAR-T cells base edited to knock-out (KO) expression of Roquin-1. The chimeric antigen receptor (CAR) polypeptides expressed by the anti-CD19 CAR-T cells contained an anti-CD19 scFv as an antigen-binding domain, a 4-1BB costimulatory domain, and a CD3ζ signaling domain. Knock out of Roquin-1 expression in the anti-CD19 CAR-T cells prolonged tumor control in the MCL model. FIG. 14B provides bioluminescence images of mice taken at about day 45 following administration of the JeKo-1 cells, where the mice were treated using anti-CD19 CAR-T cells base edited to knock-out (KO) expression of CISH, CBLB, SOCS1, Roquin-1, DNMT3A, FLI-1, RASA2, Regnase-1, CD5, or PTP1B. In FIG. 14B, tumor-free regions of the mice are shown as lighter areas (i.e., areas of low bioluminescence). In FIGS. 14A and 14B, the terms “LV224” and “WT” indicate unedited anti-CD19 CAR-T cells, the term “UTD,” which is short for “untransduced,” indicates T cells from which the CAR-T cells were derived but that do not express any chimeric antigen receptor (CAR), the term “EF08” indicates the guide polynucleotide (see Tables 1 and 2) used to base edit cells to reduce or eliminate expression of Roquin-1, and “Days Post Inoculation” indicates time in days measured from administration of the JeKo-1 cells to the mice.

[0239] FIGS. 15A to 15C provide bar graphs showing percent (%) on-target base editing efficiencies measured in immune cells for base editor systems containing the guides indicated along the x-axis (e.g., EF46; see also Tables 1 and 2). In FIGS. 15A and 15B, each guide polynucleotide name is followed by an underscore (“_”) and the name of the polypeptide encoded by the polynucleotide targeted by the guide polynucleotide. In FIG. 15C, the polypeptide encoded by the polynucleotide targeted by each guide polynucleotide is indicated below each guide polynucleotide. In FIG. 15C, a guide known to be effective in targeting a base editor to edit beta microglobulin (B2M) was used as a positive control. Many of the base editor systems evaluated had percent on-target base editing efficiencies of over about 80%. Knock-out of polypeptide expression was validated using Western blots.

[0240] FIGS. 16A and 16B provide a flow cytometry contour plot and a stacked bar graph showing that base editing of anti-CD19 CAR-T cells to reduce or eliminate expression of DCK, DGKa, DGKz, PRDM1 (BLIMP-1), PRKACA, PTPN6, EIF2A, ID3, IKZF2, SOX4, TLE4, TMEM184B, CD5, RASA2, DHX37, PFN1, BATF, or ARID1A altered CD4/CD8 CAR-T cell ratios of cells after multiple exposures to antigen relative to unedited CAR-T cells (“WT”). Prior to measuring CD4/CD8 cell ratios using flow cytometry, the CAR-T cells were stimulated four times by being exposed to antigen (see FIG. 3A) and then co-cultured overnight with Nalm6 cells (B cell precursor leukemia cells initiated from an adolescent male) at an effector to target cell (E:T) ratio of 1:1. FIG. 16A provides a representative flow cytometry contour plot showing a gating strategy for distinguishing CD4+ cells from CD8+ cells. FIG. 16B provides a stacked bar graph showing percent CD4+ and CD8+ cells measured in CAR-T cells base edited to knock out expression of the polypeptides indicated along the x-axis. The arrows in FIG. 16B indicate cell populations that had high levels of CD4+ cells.

[0241] FIGS. 17A and 17B provide bar graphs showing the percents of the CD8+ (FIG. 17A) and CD4+ (FIG. 17B) CAR-T cell populations of FIG. 16B that were also positive for expression of cluster of differentiation 25 (CD25), which is an indicator of T cell activation. Base edited CAR-T cells showed enhanced levels of activation. The dashed horizontal lines in FIGS. 17A and 17B indicate the percent CD25+ cells measured in unedited cells (“19BBz (no edit)”). The term “19BBz” refers to the anti-CD19 scFv antigen-binding domain, 4-1BB costimulatory domain, and CD3ζ signaling domain of the chimeric antigen receptor (CAR) expressed by the CAR-T cells.

[0242] FIGS. 18A and 18B provide a plot and a bar graph showing that base editing of anti-CD19 CAR-T cells to reduce or eliminate expression of DCK, DGKa, DGKz, PRDM1 (BLIMP-1), PRKACA, PTPN6, EIF2A, ID3, IKZF2, SOX4, TLE4, TMEM184B, CD5, RASA2, DHX37, PFN1, BATF, or ARID1A enhanced proliferation of the cells after multiple antigen-exposures relative to unedited CAR-T cells (“WT”). Prior to measuring cell proliferation, the CAR-T cells were stimulated four times by being exposed to antigen (see FIG. 3A). All of the CAR-T cells were prepared using T cells collected from the same donor subject. FIG. 18A provides a plot showing fold expansion of the cells over time. FIG. 18B provides a bar graph showing cumulative fold expansion values corresponding to the “full expansion curves” of FIG. 18A.

[0243] FIGS. 19A to 19C provide plots showing that base editing of anti-CD19 CAR-T cells according to the methods provided herein to reduce or eliminate expression of DCK, CD5, DGKα/ζ (DGKa and DGKz), DHX37, EIF2A, ID3, IKZF2, IL-6, PFN1, PRDM1, PRKACA, PTPN6, RASA2, SOX4, TLE, TMEM184B, or TMEM222 improved cytotoxicity of the cells after multiple antigen exposures relative to unedited CAR-T cells. Prior to measuring cytotoxicity, the CAR-T cells were stimulated four times by being exposed to CD19 antigen (see FIG. 3A). To measure cytotoxicity, the cells were co-cultured overnight with Nalm6 cells (B cell precursor leukemia cells initiated from an adolescent male) expressing green fluorescent protein (GFP) at an effector to target cell (E:T) ratio of 1:5. Clearance of the Nalm6 cells was measured over time using live cell fluorescent imaging carried out using an IncuCyte® Live-Cell Analysis System. In FIG. 19A, the cells were base edited using one of the following guides (see Tables 1 and 2A): EF46, EF58, EF74, EF76, EF85, EF86, EF91, EF112, EF114, or EF117. In FIG. 19C, the cells were base edited using one of the following guides (see Tables 1 and 2A): EF46, EF58, EF70, EF74, EF76, EF85, EF86, EF91, EF112, EF114, or EF117. In FIGS. 19A to 19C, “GCU” indicates “green calibrated unit,” which is a measure of tumor growth and is proportional to levels of green fluorescent protein expressed by the target Nalm6 tumor cells, “UTD,” which is short for “untransduced,” indicates T cells from which the CAR-T cells were derived but that do not express any chimeric antigen receptor (CAR), and “LV224” and “19BBz” indicate unedited CAR-T cells. The term “19BBz” refers to the anti-CD19 scFv antigen-binding domain, 4-1BB costimulatory domain, and CD3ζ signaling domain of the anti-CD19 chimeric antigen receptor (CAR) expressed by the CAR-T cells.

[0244] FIGS. 20A to 20D provide plots showing that base editing of anti-CD19 CAR-T cells according to the methods provided herein to reduce or eliminate expression of cluster of differentiation 5 (CD5) improved cytotoxicity of the cells after multiple (6 total) CD19 antigen exposures relative to unedited CAR-T cells similarly exposed to the CD19 antigen multiple times. The T cells were co-cultured with target cells at effector to target cell ratios (E:T) of 1:1, 1:2, 1:4, and 1:8, as indicated along the x-axes of FIGS. 20A to 20D, and lysis of the target cells was evaluated after 24 hours and 48 hours of coculture. Prior to being co-cultured with target cells, the T cells were exposed to CD19 antigen six times (see FIG. 3A). The target cells were either JeKo-1 cells (a mantle cell lymphoma (MCL) cell line isolated from the peripheral blood mononuclear cells of a 78-year-old female with a large cell variant of MCL showing leukemic conversion) or Nalm6 cells (B cell precursor leukemia cells initiated from an adolescent male). FIG. 20A provides a plot showing percent specific cell lysis of Nalm6 target cells after 24 hours of co-culture. FIG. 20B provides a plot showing percent specific cell lysis of Nalm6 target cells after 48 hours of co-culture. FIG. 20C provides a plot showing percent specific cell lysis of JeKo-1 target cells after 24 hours of co-culture. FIG. 20D provides a plot showing percent specific cell lysis of JeKo-1 target cells after 48 hours of co-culture. In FIGS. 20A to 20D, the term “UTD,” which is short for “untransduced,” indicates T cells from which the CAR-T cells were derived but that do not express any chimeric antigen receptor (CAR), “6 Ag-Exp” indicates “six antigen exposures,” and “19BBz” indicates unedited CAR-T cells. In FIGS. 20A to 20D, a negative “% specific lysis” indicates that the target cells showed net proliferation during the co-culture so that there were more target cells at the end of co-culture than at the beginning.

[0245] FIGS. 21A and 21B provide plots demonstrating that knock-out (KO) of Roquin-1 expression in chimeric antigen receptor (CAR) expressing T cells (CAR-T cells) was associated with improved cytotoxicity in vitro independent of the co-stimulatory domain of the chimeric antigen receptor. The CAR polypeptides contained an anti-CD19 scFv as an antigen-binding domain, either a 4-1BB costimulatory domain or a CD28 co-stimulatory domain, and a CD3ζ signaling domain. Cytotoxicity of the CAR-T cells was measured using an IncuCyte® Live-Cell Analysis System following being exposed to antigen 6 times according to the method shown in FIG. 3A. The CAR-T cells were co-cultured with JeKo-1 lymphoblast cells expressing green fluorescent protein (GFP) at an effector-to-target ratio (E:T) of 1:5, where the CAR-T cells were the effector cells and the JeKo-1 cells were the target cells. FIG. 21A provides a plot showing improved cytotoxicity of Roquin-1 KO CAR-T cells relative to unedited CAR-T cells, where the CAR polypeptides contained a R-1BB co-stimulatory domain. FIG. 21B provides a plot showing improved cytotoxicity of Roquin-1 KO CAR-T cells relative to unedited CAR-T cells, where the CAR polypeptides contained a CD28 co-stimulatory domain. In FIGS. 21A and 21B the term “19BBz” refers to T cells expressing Roquin-1 and a CAR polypeptide containing an anti-CD19 scFv antigen-binding domain, 4-1BB costimulatory domain, and CD3ζ signaling domain; the term “1928z” refers to T cells expressing Roquin-1 and a CAR polypeptide containing an anti-CD19 scFv antigen-binding domain, CD28 costimulatory domain, and CD3ζ signaling domain; the term “Roquin-1 KO” indicates CAR-T cells modified to knock out expression of Roquin-1; the term “T cells” indicates T cells that express Roquin-1 and do not express any CAR; and the term “GCU” indicates a Green calibrated unit (GCU).

[0246] FIGS. 22A to 22C provide plots demonstrating, when compared, e.g., to FIGS. 21A and 21B, that knock-out (KO) of Roquin-1 expression in chimeric antigen receptor (CAR) expressing T cells (CAR-T cells) lead to an increase in cytotoxicity of CAR-T cells across alternative scFv domains. The CAR polypeptides contained an anti-CD22 scFv domain, a 4-1BB costimulatory domain, and a CD3ζ signaling domain. The CAR-T cells were co-cultured with antigen-positive Nalm-6 tumor cells expressing GFP at effector-to-target ratios (E:T) of 1:2 (FIG. 22A), 1:5 (FIG. 22B), and 1:10 (FIG. 22C), where the effector cells were the CAR-T cells and the target cells were the Nalm-6 tumor cells expressing GFP. Cytotoxicity of the CAR-T cells was measured using an IncuCyte® Live-Cell Analysis System following being exposed to antigen 4 times according to the method shown in FIG. 3A. In FIGS. 22A to 22C, the term “22BBz CAR cells” refers to T cells expressing Roquin-1 and a CAR polypeptide containing an anti-CD22 scFv antigen-binding domain, 4-1BB costimulatory domain, and CD3ζ signaling domain; the term “Roquin-1 KO” indicates CAR-T cells modified to knock out expression of Roquin-1; the term “Tumor only” indicates Nalm-6 tumor cells cultured in the absence of any effector cells; and the term “GCU” indicates a Green calibrated unit (GCU).

[0247] FIG. 23 provides a bar graph demonstrating that Roquin-1 knock-out (KO) chimeric antigen receptor (CAR) expressing T cells (CAR-T cells) expressing two different chimeric antigen receptors showed improved anti-tumor activity over similar CAR-T cells expressing Roquin-1. The CAR-T cells expressed two CAR polypeptides where one CAR polypeptide contained an anti-CD19 scFv domain, a 4-1BB costimulatory domain, and a CD3ζ signaling domain and the other CAR polypeptide contained an anti-ROR1 scFv domain, a CD28 costimulatory domain, and a CD3ζ signaling domain. The CAR-T cells were also editing according to the methods provided herein to knock-out expression of one of the following polypeptides prior to evaluating cytotoxicity (see x-axis of FIG. 23): CISH, SOCS1, Roquin-1, DNMT3A, FLI1, Regnase-1, DGKa, DGKz, PRKACA, PTPN6, EIF2A, RASA2, or DHX37. The CAR-T cells, which were not previously contacted with a target antigen, were co-cultured with JeKo-1 lymphoblast cells expressing GFP at an effector-to-target ratio (E:T) of 1:5, where the CAR-T cells were the effector cells and the JeKo-1 cells were the target cells. Cytotoxicity of the CAR-T cells was measured using an IncuCyte® Live-Cell Analysis System. FIG. 23 provides a bar graph showing the area under the curve (AUC) for plots of tumor levels over time, measured as green calibrated units (GCU), for the co-cultures. In FIG. 23 the terms “T cells” and “UTD” indicate T cells without expression of any of the above-listed polypeptides knocked out and that do not express a CAR (i.e., untransduced (UTD) cells); the terms “WT aROR1/CD19 CAR” and “WT Dual CAR” indicate CAR-T cells expressing the two CAR polypeptides and without expression of any of the above-listed polypeptides knocked out; and the term “Roquin-1 KO” indicates CAR-T cells altered to knock out expression of Roquin-1.

[0248] FIGS. 24A to 24C each provide a plot presenting data from FIGS. 14A and 14B in an alternative format and demonstrating that knock-out of Roquin-1 increased the ability of CAR-T cells to kill tumor cells in the mantle cell lymphoma (MCL) mouse model. FIG. 24C provides a plot where data corresponding to Roquin-1 knock-out responders (2 out of 10 (8/10) total mice) are plotted separately from data corresponding to Roquin-1 knock-out non-responders (2 out of 10 (2/10) total mice), where “responder” indicates a mouse where administration of Roquin-1 knock-out (KO) chimeric antigen receptor (CAR) expressing T cells (CAR-T cells) led to an increased reduction in tumor levels in the mice relative to administration of CAR-T cells expressing Roquin-1. In FIGS. 24A to 24C, the term “T cells” indicates mice administered T cells that were not edited to knock-out expression of CISH, CBLB, SOCS1, Roquin-1, DNMT3A, FLI-1, RASA2, Regnase-1, CD5, or PTP1B and that did not express any CAR polypeptide; the term “19BBz CAR-T cells” indicates mice administered CAR-T cells that were not edited to knock-out expression of CISH, CBLB, SOCS1, Roquin-1, DNMT3A, FLI-1, RASA2, Regnase-1, CD5, or PTP1B; the terms “SOCS1 KO,” “FLI-1 KO,” “Roquin-1 KO,” and “CBLB KO” indicate mice administered CAR-T cells edited to knock-out expression of the indicated polypeptide; the term “Roquin-1 KO (responders)” indicates mice where administration of Roquin-1 KO CAR-T cells led to a reduction in tumor levels in the mice relative to mice administered CAR-T cells expressing Roquin-1; the term “Roquin-1 KO (non-responders)” indicates mice where administration of Roquin-1 KO CAR-T cells did not lead to a significant reduction in tumor levels in the mice relative to mice administered CAR-T cells expressing Roquin-1.

[0249] FIGS. 25A and 25B provide plots showing that Roquin-1 knock-out (KO) chimeric antigen receptor (CAR) T cells cleared tumors in vivo and were associated with improved prevention of tumor recurrence relative to CAR-T cells expressing Roquin-1. The CAR-T cells expressed a CAR polypeptide containing an anti-CD19 scFv as an antigen-binding domain, a 4-1BB costimulatory domain, and a CD3ζ signaling domain. Anti-tumor activity of the CAR-T cells was evaluated using a sub-therapeutic (FIG. 25A) or tumor clearance and rechallenge (FIG. 25B) mantle cell lymphoma (MCL) model involving the infusion (“inoculation”) of 5E5 JeKo-1 cells (a mantle cell lymphoma (MCL) cell line isolated from the peripheral blood mononuclear cells of a 78-year-old female with a large cell variant of MCL showing leukemic conversion) expressing luciferase into mice at day zero (0) and subsequently infusing 2.5E5 CAR-T cells (FIG. 25A; “low dose”) or 2.5E6 CAR-T cells (FIG. 25B; “high dose”) into the mice at day 7. The plots of FIGS. 26A and 25B show measurements over time of tumor growth, measured as luciferase flux in photons per second (p/s) in the mice. The CAR-T cells were edited according to the methods provided herein to knock-out expression of DGKz, FLI-1, or Roquin-1. In FIGS. 25A and 25B, the term “T cells” indicates mice administered T cells that were not edited to knock-out expression of DGKz, FLI-1, or Roquin-1 and that did not express any CAR polypeptide; the term “19BBz CAR-T cells” indicates mice administered CAR-T cells that were not edited to knock-out expression of DGKz, FLI-1, or Roquin-1; the terms “DGKz KO,” “FLI-1 KO,” and “Roquin-1 KO” indicate mice administered CAR-T cells edited to knock-out expression of the indicated polypeptide; and the term “Tumor only” indicates mice that were not administered any effector cells (e.g., CAR-T cells or T cells). In FIG. 25B, the vertical dotted line indicates the time at which the mice were re-administered the JeKo-1 cells.

[0250] FIGS. 26A and 26B provide a plot and bar graph that, when compared to FIGS. 25A and 25B, show that knock-out (KO) of Roquin-1 in chimeric antigen receptor (CAR) expressing T cells (CAR-T cells) enhanced efficacy of the CAR-T cells independent of the co-stimulatory domain of the CAR polypeptide. The CAR-T cells expressed a CAR polypeptide containing an anti-CD19 scFv as an antigen-binding domain, a CD28 costimulatory domain, and a CD3ζ signaling domain. Anti-tumor activity of the CAR-T cells was evaluated using a sub-therapeutic mantle cell lymphoma (MCL) model involving the infusion (“inoculation”) of 5E5 JeKo-1 cells (a mantle cell lymphoma (MCL) cell line isolated from the peripheral blood mononuclear cells of a 78-year-old female with a large cell variant of MCL showing leukemic conversion) expressing luciferase into mice at day zero (0) and subsequently infusing 2.5E5 CAR-T cells into the mice at day 7. FIG. 26A shows measurements over time of tumor growth, measured as luciferase flux in photons per second (p/s) in the mice, and FIG. 26B provides a bar graph showing the area under the curve (AUC) for each curve of FIG. 26A. The CAR-T cells were edited according to the methods provided herein to knock-out expression of DGKz, FLI-1, or Roquin-1. In FIGS. 25A and 25B, the term “T cells” indicates mice administered T cells that were not edited to knock-out expression of DGKz, FLI-1, or Roquin-1 and that did not express any CAR polypeptide; the term “1928z CAR-T cells” indicates mice administered CAR-T cells that were not edited to knock-out expression of DGKz, FLI-1, or Roquin-1; and the terms “DGKz KO,” “FLI-1 KO,” and “Roquin-1 KO” indicate mice administered CAR-T cells edited to knock-out expression of the indicated polypeptide.

[0251] FIG. 27 provides a schematic diagram summarizing an experiment undertaken to evaluate expansion kinetics and cytokine secretion of chimeric antigen receptor (CAR) expression T cells (CAR-T cells) of the disclosure in vivo. Anti-tumor activity of the CAR-T cells was evaluated using a mantle cell lymphoma (MCL) model involving the infusion (“inoculation”) of 5E5 JeKo-1 cells (a mantle cell lymphoma (MCL) cell line isolated from the peripheral blood mononuclear cells of a 78-year-old female with a large cell variant of MCL showing leukemic conversion) expressing luciferase into mice at day zero (−7) and subsequently infusing CAR-T cells into the mice at day 0. The CAR-T cells expressed a CAR polypeptide containing an anti-CD19 scFv as an antigen-binding domain, a 4-1BB costimulatory domain, and a CD3ζ signaling domain. Bleed samples were collected from the mice twice a week, and tumor growth was evaluated once a week using an IVIS® Spectrum In Vivo Imaging System. Serum was collected from the mice to measure cytokines, and the blood was processed to quantify CAR-T cell counts using flow cytometry (CAR/EGFR detection+phenotyping (CD45RA, CD62L)). The following cytokines were measured: IL-2, IL-6, TNFα, IFNγ, GM-CSF, and GRZB. The terms “Group A” and “Group B” in FIG. 27 refer to the mice corresponding to Group 1A, 2A, 3A, 4A, 5A, and/or 6A or to Group 1B, 2B, 3B, 4B, 5B, and/or 6B described in Table 9, respectively.

[0252] FIG. 28 provides a set of plots showing data corresponding to the experiment described in FIG. 27 and demonstrating that peak CAR-T cell expansion was detected at between 7 and 10 days post-administration of the CAR-T cells. In FIG. 28, the term “low dose” indicates mice administered 5E+5 CAR-T cells; the term “high dose” indicates mice administered 2.5E+6 CAR-T cells; the terms “DGKz” and “Roquin-1” indicate mice administered T cells edited to knock-out expression of the indicated polypeptide; and the term “LV224” indicates CAR-T cells that were not edited to knock out expression of DGKz or Roquin-1.

[0253] FIG. 29 provides a set of plots showing data corresponding to the experiment described in FIG. 27 and demonstrating that CAR-T cell expansion kinetics correlated with detected tumor burden in vivo. In FIG. 29, the term “low dose” indicates mice administered 5E+5 CAR-T cells; the term “high dose” indicates mice administered 2.5E+6 CAR-T cells; the terms “DGKz” and “Roquin-1” indicate mice administered T cells edited to knock-out expression of the indicated polypeptide; the term “LV224” indicates CAR-T cells that were not edited to knock out expression of DGKz or Roquin-1; the term “CAR Expansion” indicates CAR-T cell counts in blood samples measured over time; and the term “Mouse BLI” indicates measurements over time of tumor growth, measured using in vivo bioluminescent imaging (BLI) as luciferase flux in photons per second (p/s) in the mice. In FIG. 29, the “CAR Expansion” curve corresponds to the right y-axis and the “Mouse BLI” curve corresponds to the left y-axis.

[0254] FIG. 30 provides a bar graph showing data corresponding to the experiment described in FIG. 27 and demonstrating that Roquin-1 knock-out (KO) CAR-T cells maintained the central memory phenotype over time. In FIG. 30, the term “CAR T cells” indicates CAR-T cells that were not edited to knock out expression of DGKz or Roquin-1; and the term “CAR T+Roquin-1 KO” indicates CAR-T cells modified accordingly to the methods provided herein to knock-out expression of Roquin-1.

[0255] FIG. 31 provides a schematic diagram summarizing a mechanism of action for chimeric antigen receptor (CAR) expressing T cells.

[0256] FIG. 32 provides a schematic diagram showing how Roquin-1 regulates mRNA degradation.

[0257] FIGS. 33A to 33D provide bar graphs and flow cytometry histograms demonstrating that Roquin-1 knock-out in CAR-T cells was associated with an increase in expression in the CAR-T cells of the activation markers OX40 and CD25. The CAR-T cells expressed a CAR polypeptide containing an anti-CD19 scFv as an antigen-binding domain, a 4-1BB costimulatory domain, and a CD3ζ signaling domain. The CAR-T cells were co-cultured for 24-hours with JeKo-1 cells (a mantle cell lymphoma (MCL) cell line isolated from the peripheral blood mononuclear cells of a 78-year-old female with a large cell variant of MCL showing leukemic conversion). The CAR-T cells were co-cultured at an effector-to-target ratio of 1:1 with the JeKo-1 cells following being exposed to antigen 4 times according to a method similar to that shown in FIG. 3A with the modification that the cells were contacted with beads coated with the antigen targeted by the CAR T cells rather than with plates coated with the antigen. FIG. 33A provides a plot showing percent of total CD4+ or CD8+ CAR-T cells expressing OX40. FIG. 33B provides a flow cytometry histogram showing levels of OX40 expression in CD4+ CAR-T cells. FIG. 33C provides a bar graph showing geometric mean of fluorescence intensity (GMRI) measuring levels of CD25 expression in CD4+ or CD8+ CAR-T cells. Each set of four bars in FIGS. 33A and 33C correspond from left-to-right to “Roquin1,” “FL1,” “DGKz,” and “WT,” respectively. FIG. 33D provides flow cytometry histograms showing levels of CD25 expression in CD8+ CAR-T cells. The flow cytometry histograms in each of FIGS. 33B and 33D correspond from top-to-bottom to “Roquin1,” “FLI,” “DGKz,” and “WT,” respectively. In FIGS. 33A to 33D “Roquin1,” “FLI1,” and “DGKz” indicate CAR-T cells modified according to the methods provided herein to knock-out expression of Roquin-1, FLI-1, or DGKz, respectively; and the term “WT” indicates CAR-T cells expressing each of Roquin-1, FLI-1, and DGKz.

[0258] FIGS. 34A to 34D provide bar graphs and flow cytometry histograms demonstrating that Roquin-1 knock-out in CAR-T cells was associated with increased expression of T cell co-stimulatory signals. The CAR-T cells expressed a CAR polypeptide containing an anti-CD19 scFv as an antigen-binding domain, a 4-1BB costimulatory domain, and a CD3ζ signaling domain. The CAR-T cells were co-cultured for 24-hours with JeKo-1 cells (a mantle cell lymphoma (MCL) cell line isolated from the peripheral blood mononuclear cells of a 78-year-old female with a large cell variant of MCL showing leukemic conversion). The CAR-T cells were co-cultured at an effector-to-target ratio of 1:1 with the JeKo-1 cells following being exposed to antigen 4 times according to the method shown in FIG. 3A. FIG. 34A provides a plot showing geometric mean of fluorescence intensity (GMRI) measuring levels of expression of ICOS in CD4+ CAR-T cells. FIG. 34B provides a flow cytometry histogram showing levels of ICOS expression in CD4+ CAR-T cells. FIG. 34C provides a bar graph showing percent of total CD4+ or CD8+ CAR-T cells expressing CD28. Each set of four bars in FIGS. 34A and 34C correspond from left-to-right to “Roquin1,” “FL1,” “DGKz,” and “WT,” respectively. FIG. 33D provides flow cytometry histograms showing levels of CD28 expression in CD8+ CAR-T cells. The flow cytometry histograms in each of FIGS. 34B and 34D correspond from top-to-bottom to “Roquin1,” “FL1,” “DGKz,” and “WT,” respectively. In FIGS. 34A to 34D “Roquin1,” “FLIT,” and “DGKz” indicate CAR-T cells modified according to the methods provided herein to knock-out expression of Roquin-1, FLI-1, or DGKz, respectively; and the term “WT” indicates CAR-T cells expressing each of Roquin-1, FLI-1, and DGKz.

[0259] FIGS. 35A to 35C provide bar graphs and flow cytometry scatter plots demonstrating that Roquin-1 knock-out in CAR-T cells was associated with a large increase in IL-2 secretion compared to CAR-T cells expressing Roquin-1. The CAR-T cells expressed a CAR polypeptide containing an anti-CD19 scFv as an antigen-binding domain, a 4-1BB costimulatory domain, and a CD3ζ signaling domain. The CAR-T cells were co-cultured at an effector-to-target ratio of 1:1 for 24-hours with Raji cells (a line of lymphoblast-like cells isolated in 1963 from the jaw of a Burkitt's lymphoma patient). The CAR-T cells were co-cultured with the Raji cells following being exposed to antigen 1 or 5 times (e.g., 5 times for FIGS. 35B and 35C) according to the method shown in FIG. 3A. FIG. 35A provides a bar graph showing measured levels of secreted IL-2 for CAR-T cells exposed to antigen once (1×) or five times (5×) prior to co-culture. FIG. 35B provides a bar graph showing geometric mean of fluorescence intensity (GMRI) measuring levels of intracellular expression of IL-2 for CD4+ or CD8+ CAR-T cells. Each set of four bars in FIGS. 35A and 35B correspond from left-to-right to “Roquin1,” “FL1,” “DGKz,” and “WT,” respectively. FIG. 35C provides flow cytometry scatter plots showing counts of CD4+ CAR-T cells expressing IL-2 intracellularly, where the percent of total cells counted falling within each outlined region is indicated above each respective outlined region. In FIGS. 35A to 35C, “Roquin1,” “FLIT,” and “DGKz” indicate CAR-T cells modified according to the methods provided herein to knock-out expression of Roquin-1, FLI-1, or DGKz, respectively; and the term “WT” indicates CAR-T cells expressing each of Roquin-1, FLI-1, and DGKz.

[0260] FIGS. 36A to 36C provide bar graphs and flow cytometry scatter plots demonstrating that Roquin-1 knock-out in CAR-T cells was associated with a increases in interferon gamma (IFNγ) secretion compared to CAR-T cells expressing Roquin-1. The CAR-T cells expressed a CAR polypeptide containing an anti-CD19 scFv as an antigen-binding domain, a 4-1BB costimulatory domain, and a CD3ζ signaling domain. The CAR-T cells were co-cultured at an effector-to-target ratio of 1:1 for 24-hours with Raji cells (a line of lymphoblast-like cells isolated in 1963 from the jaw of a Burkitt's lymphoma patient). The CAR-T cells were co-cultured with the Raji cells following being exposed to antigen 1 or 5 times (e.g., 5 times for FIG. 36C) according to the method shown in FIG. 3A. FIG. 36A provides a bar graph showing measured levels of secreted IFNγ for CAR-T cells exposed to antigen once (1×) or five times (5×) prior to co-culture. FIG. 36B provides a bar graph showing percent of total CD4+ or CD8+ CAR-T cells intracellularly expressing IFNγ. Each set of four bars in FIGS. 36A and 36B correspond from left-to-right to “Roquin1,” “FL1,” “DGKz,” and “WT,” respectively. FIG. 36C provides flow cytometry scatter plots showing counts of CD8+ and CD4+ CAR-T cells expressing IL-2 and IFNγ intracellularly, where the percent of total cells counted falling within each quadrant is indicated by a number within the respective quadrant. In FIG. 36A, “Roquin1,” “FLI1,” and “DGKz” indicate CAR-T cells modified according to the methods provided herein to knock-out expression of Roquin-1, FLI-1, or DGKz, respectively; and the term “WT” indicates CAR-T cells expressing each of Roquin-1, FLI-1, and DGKz.

[0261] FIGS. 37A and 37B provide bar graphs and flow cytometry scatter plots showing TNF-α in CAR-T cells modified to knock out expression of Roquin-1 (Roquin1), FLI-1, or DGKZ. The CAR-T cells expressed a CAR polypeptide containing an anti-CD19 scFv as an antigen-binding domain, a 4-1BB costimulatory domain, and a CD3ζ signaling domain. The CAR-T cells were co-cultured for 24-hours with Raji cells (a line of lymphoblast-like cells isolated in 1963 from the jaw of a Burkitt's lymphoma patient). The CAR-T cells were co-cultured at an effector-to-target ratio of 1:1 with the Raji cells following being exposed to antigen 1 or 5 times according to the method shown in FIG. 3A. FIG. 37A provides a bar graph showing measured levels of secreted TNF-α for CAR-T cells exposed to antigen once (1×) prior to co-culture. FIG. 37B provides a bar graph showing measured levels of secreted TNF-α for CAR-T cells exposed to antigen five times (5×) prior to co-culture. In FIGS. 37A and 37B, “Roquin1,” “FLI1,” and “DGKz” indicate CAR-T cells modified according to the methods provided herein to knock-out expression of Roquin-1, FLI-1, or DGKz, respectively; and the term “WT” indicates CAR-T cells expressing each of Roquin-1, FLI-1, and DGKz.

### DETAILED DESCRIPTION OF THE DISCLOSURE

[0262] The disclosure features multiplex base edited chimeric antigen receptor (CAR)-expressing immune effector cells (e.g., T or NK cells) having increased resistance to development of an exhausted phenotype (e.g., increased cytotoxicity, proliferation, survival, and/or cytokine production) after repeated or continuous stimulation by an antigen relative to unedited CAR immune effector cells, compositions containing the cells, methods for the preparation of the cells, and methods for use of the cells in treating a disease or disorder (e.g., an autoimmune disorder or a neoplasia, such as a leukemia).

[0263] The disclosure is based, at least in part, on the discovery that chimeric antigen receptor (CAR) T cells base edited to reduce or eliminate expression of Roquin-1, CBLB, CD5, Chop, CISH, DCK, DGKα/ζ, DHX37, DNMT3A, EIF2A, FLI-1, ID3, IKZF2, IL-6, PFN1, PRDM1, PRKACA, PTP1B, PTPN6, RASA2, Regnase-1, SOCS1, SOX4, TLE, TMEM184B, or TMEM222 had a reduced tendency relative to unedited CAR-T cells to develop an exhausted phenotype after being stimulated by multiple antigen exposures or continuous exposure to an antigen. The base edited CAR-T cells showed increased efficacy (e.g., increased cytotoxicity, increased proliferation, and/or increased cytokine production) relative to unedited CAR-T cells. In various embodiments, the improved efficacy of the CAR-T cells and/or reduced tendency to develop the exhausted phenotype is independent of tumor composition and/or phenotype in a subject administered the CAR-T cells.

[0264] Accordingly, the disclosure provides multiplex base edited CAR-expressing immune effector cells with a reduction in susceptibility to becoming dysfunctional after multiple or continuous antigen exposures.

### Immune Effector Cell Exhaustion

[0265] Immune effector cells, such as chimeric antigen receptor (CAR) T cells, are susceptible to becoming dysfunctional or developing an exhausted phenotype when stimulated continuously or multiple times by a target antigen (see FIG. 2). For example, when a CAR-T cells is continuously or repeatedly activated by a target antigen, the CAR-T cell is susceptible to showing a reduction in cytotoxicity, antitumor properties, proliferation, and/or cytokine production as a result of the continuous or repeated activation, and this resulting reduction can be referred to as “dysfunction” an “exhausted phenotype” or “functional exhaustion.” The exhausted phenotype can also be associated with upregulation of repressor genes, increase in inhibitory receptors, reduction in quantity of immune effector cells, and/or reduced survival of the immune effector cells. The exhausted phenotype is epigenetically reinforced. Immune effector cell exhaustion is described further in Jiang, et al., “T-cell exhaustion in the tumor microenvironment,” Cell Death and Disease, 6:e1792 (2015), the disclosure of which is incorporated herein in its entirety by reference for all purposes.

### CAR-T Cell Therapies

[0266] The present disclosure provides immune cells (e.g., T- or NK-cells) modified using nucleobase editors and/or nucleases described herein. The modified immune cells may express chimeric antigen receptors (CARs) (e.g., CAR-T cells). Modification of immune cells to express a chimeric antigen receptor can enhance an immune cell's immunoreactive activity, where the chimeric antigen receptor has an affinity for an epitope on an antigen, and where the antigen is associated with an altered fitness of an organism. For example, the chimeric antigen receptor can have an affinity for an epitope on a protein expressed in a diseased cell. Because the CAR-T cells can act independently of major histocompatibility complex (MHC), activated CAR-T cells can kill the diseased cell expressing the antigen. The direct action of the CAR-T cell evades defensive mechanisms that have evolved in response to MHC presentation of antigens to immune cells. FIG. 31 provides a schematic diagram providing a description of a mechanism of action for CAR-T cells attacking a tumor cell.

[0267] The modified immune cells and methods provided herein address known limitations of CAR-T therapy and represent a promising development towards the next generation of precision cell-based therapies.

[0268] In embodiments, one or more genes are modified in an immune effector cell so that the cell has a reduced level of, lacks, or have virtually undetectable levels of CBLB, CD5, Chop, CISH, DCK, DGKα/ζ, DHX37, DNMT3A, EIF2A, FLI-1, ID3, IKZF2, IL-6, PFN1, PRDM1, PRKACA, PTP1B, PTPN6, RASA2, Regnase-1, Roquin-1, SOCS1, SOX4, TLE, TMEM184B, and/or TMEM222. In embodiments, one or more genes are modified in an immune effector cell so that the cell has a reduced level of, lacks, or have virtually undetectable levels of 1, 2, 3, 4, or 5 of the following polypeptides: CBLB, CD5, Chop, CISH, DCK, DGKα/ζ, DHX37, DNMT3A, EIF2A, FLI-1, ID3, IKZF2, IL-6, PFN1, PRDM1, PRKACA, PTP1B, PTPN6, RASA2, Regnase-1, Roquin-1, SOCS1, SOX4, TLE, TMEM184B, and TMEM222. In embodiments, one or more genes are modified in an immune effector cell so that the cell has a reduced level of, lacks, or have virtually undetectable levels of beta-2-microglobulin (B2M), cluster of differentiation 3-epsilon (CD3e), cluster of differentiation 3-gamma (CD3g), class II major histocompatibility complex transactivator (CIITA), programmed cell death 1 (PD1), and T cell receptor constant region (TRAC). In embodiments, one or more genes are modified in an immune effector cell so that the cell has a reduced level of, lacks, or have virtually undetectable levels of CBLB, CD5, Chop, CISH, DCK, DGKα/ζ, DHX37, DNMT3A, EIF2A, FLI-1, ID3, IKZF2, IL-6, PFN1, PRDM1, PRKACA, PTP1B, PTPN6, RASA2, Regnase-1, Roquin-1, SOCS1, SOX4, TLE, TMEM184B, and/or TMEM222 and of beta-2-microglobulin (B2M), cluster of differentiation 3-epsilon (CD3e), cluster of differentiation 3-gamma (CD3g), class II major histocompatibility complex transactivator (CIITA), programmed cell death 1 (PD1), and T cell receptor constant region (TRAC).

[0269] In embodiments, one or more genes are modified in an immune effector cell so that the cell has a reduced level of, lacks, or have virtually undetectable levels of CBLB, CD5, Chop, CISH, DCK, DGKα/ζ, DHX37, DNMT3A, EIF2A, FLI-1, ID3, IKZF2, IL-6, PFN1, PRDM1, PRKACA, PTP1B, PTPN6, RASA2, Regnase-1, Roquin-1, SOCS1, SOX4, TLE, TMEM184B, and/or TMEM222, and/or one or more of the following polypeptides relative to an unmodified immune cell: B cell leukemia/lymphoma 11b (Bcl11b); B cell leukemia/lymphoma 2 related protein A1d (Bcl2a1d); B cell leukemia/lymphoma 6 (Bcl6); butyrophilin-like 6 (Btnl6); CD151 antigen (Cd151); chemokine (C—C motif) receptor 7 (Ccr7); discs large MAGUK scaffold protein 5 (Dlg5); erythropoietin (Epo); G protein-coupled receptor 18 (Gpr18); interferon alpha 15 (Ifna15); interleukin 6 signal transducer (Il6st); interleukin 7 receptor (Il7r); Janus kinase 3 (Jak3); membrane associated ring-CH-type finger 7 (Marchf7); NCK associated protein 1 like (Nckap1l); phospholipase A2, group IIF (Pla2g2f); runt related transcription factor 3 (Runx3); Signal-regulatory protein beta 1B (Sirpb1b); transforming growth factor, beta 1 (Tgfb1); tumor necrosis factor (ligand) superfamily, member 14 (Tnfsf14); tumor necrosis factor (ligand) superfamily, member 18 (Tnfsf18); tumor necrosis factor (ligand) superfamily, member 8 (Tnfsf8); zinc finger CCCH type containing 8 (Zc3h8); (Rac family small GTPase 2); (Slc4a1); 5-azacytidine induced gene 2 (Azi2); a disintegrin and metalloprotease domain 17 (Adam 17); a disintegrin and metalloprotease domain 8 (Adam8); Acetyl-CoA Acetyltransferase 1 (ACAT1); ACLY; adapter related protein complex 3 beta 1 sububit (Ap3b1); adapter related protein complex 3 delta 1 sububit (Ap3d1); adenosine A2a receptor (Adora2a); adenosine deaminase (Ada); adenosine kinase (Adk); adenosine regulating molecule 1 (Adrm1); advanced glycosylation end product-specific receptor (Ager) allograft inflammatory factor 1 (Aif1); AKT1; AKT2; amyloid beta (A4) precursor protein-binding family B member 1 interacting protein (Apbb1ip); ankyrin repeat and LEM domain (Ankle1); annecin A1 (Anxa1); arginase liver (Arg 1); arginase type II (Arg 2); AtPase Cu++ transporting, alpha polypeptide (Atp7a); autoimmune regulator (Aire); autophagy related 5 (Atg5); AXL; B and T Lymphocyte Associated (BTLA); B and T lymphocyte associated (Btla); B cell leukemia/lymphoma 10 (Bcl10); B cell leukemia/lymphoma 11a (Bcl11a); B cell leukemia/lymphoma 2 (Bcl2); B cell leukemia/lymphoma 3 (Bcl3); basic leucine zipper transcription factor, ATF-like (Batf); BCL2-associated X protein (Bax); BCL2L11; beta 2 microglobulin (B2m); BL2-associated agonist of cell death (Bad); BLIMP1; Bloom syndrome, RecQ like helicase (Blm); Bmi1 polycomb ring finger oncogene (Bmi1); Bone morphogenic protein 4 (Bmp4); Braf transforming gene (Braf); butyrophilin, subfamily 2, member A1 (Btn2a1); butyrophilin, subfamily 2, member A2 (Btn2a2); butyrophilin-like 1 (Btnl1); butyrophilin-like 2 (Btnl2); c-abl oncogene 1 (Abl1); c-abl oncogene 2 (Abl2); cadherin-like 26(Cdh26); calcium channel, voltage dependent, beta 4 subunit (Cacnb4); CAMK2D; capping protein regulator and myosin 1 linker 2 (Carmil2); carcinoembryonic antigen-related cell adhesion molecule (Ceacam1); Casitas B-lineage lymphoma b (Cblb); CASP8; Caspase 3 (Casp3); caspase recruitment domain family member 11 (Card11); catenin (cadherin associated protein), beta 1 (Ctnnb1); caveolin 1 (Cav1); CBL-B; CCAAT/enhancer binding protein (C/EBP), beta (Cebpb); CCR10; CCR4; CCR5; CCR6; CCR9; CD103; CD11a; CD122; CD123; CD127; CD130; CD132; CD160 antigen (Cd160); CD161; CD19; CD1d1 antigen (Cd1d1); CD1d2 antigen (CD1d2); CD2 antigen (CD2); CD209e antigen (Cd209e); CD23; CD244 molecule A (Cd244a); CD24a antigen (Cd24a); CD27 antigen (CD27); CD274 antigen (Cd274); CD276 antigen (Cd276); CD28 antigen (Cd28); CD3 delta; CD3 epsilon; CD3 gamma; CD30; CD300A molecule (Cd300a); CD33; CD38; CD4 antigen (Cd4); CD40 ligand (Cd40lg); CD44 antigen (Cd44); CD46 antigen, complement regulatory protein (Cd46); CD47 antigen (Rh-related antigen, integrin-associated signal transducer) (Cd47); CD48 antigen (Cd48); CD5 antigen (Cd5); CD52; CD58; CD59b antigen (Cd59b); CD6 antigen (Cd6); CD69; CD7; CD70; CD74 antigen (Cd74); CD8; CD8 antigen (Cd8); CD80 antigen (Cd80); CD81 antigen (Cd81); CD82; CD83 antigen (Cd83); CD86; CD86 antigen (Cd86); CD8A; CD96; CD99; CDK4; CDK8; CDKN1B; chemokine (C motif) ligand 1 (Xcl1); chemokine (C—C motif) ligand 19 (Ccl19); chemokine (C—C motif) ligand 2 (Ccl2); chemokine (C—C motif) ligand 20 (Ccl20); chemokine (C—C motif) ligand 5 (Ccl5); chemokine (C—C motif) receptor 2 (Ccr2); chemokine (C—C motif) receptor 6 (Ccr6); chemokine (C—C motif) receptor 9 (Ccr9); chemokine (C—X—C motif) ligand 12 (Cxcl12); chemokine (C—X—C motif) receptor (Cxcr4); Chitinase 3 Like 1 (Chi3l1); cholinergic receptor, nicotinic, alpha polypeptide 7 (Chrna7); chromodomain helicase DNA binding protein 7 (Chd7); CLA; Class II Major Histocompatibility Complex Transactivator (CIITA); cleft lip and palate associated transmembrane protein 1 (Clptm1); Cluster of Differentiation 123 (CD123); Cluster of Differentiation 3 (CD3); Cluster of Differentiation 33 (CD33); Cluster of Differentiation 52 (CD52); Cluster of Differentiation 7 (CD7); Cluster of Differentiation 96 (CD96); coagulation factor II (thrombin) receptor-like 1 (F2rl1); coil-coil domain containing 88B (Ccdc88b); core-binding factor beta (Cbfb); coronin, actin binding protein 1A (Coro1a); coxsackie virus and adenovirus receptor (Cxadr); CS-1; CSF2CSK; c-src tyrosine kinase (Csk); C-type lectin domain family 2, member i (Clec2i); C-type lectin domain family 4, member a2 (Clec4a2); C-type lectin domain family 4, member d (Clec4d); C-type lectin domain family 4, member e (Clec4e); C-type lectin domain family 4, member f (Clec4f); C-type lectin domain family 4, member g (Clec4g); CUL3; CXCR3; cyclic GMP-AMP synthase (Cgas); cyclin D3 (Ccnd3); cyclin dependent kinase inhibitor 2A (Cdkn2a); cyclin-dependent kinase (Cdk6); CYLD lysine 63 deubiquitinase (Cyld); cysteine-rich protein 3 (Crip3); cytidine 5′-triphosphate synthase (Ctps); Cytochrome P450 Family 11 Subfamily A Member 1 (Cyp11a1); cytochrome P450, family 26, subfamily b, polypeptide (Cyp26b1); Cytokine Inducible SH2 Containing Protein (CISH); cytotoxic T lymphocyte-associated protein 2 alpha (Ctla2a); Cytotoxic T-Lymphocyte Associated Protein 4 (CTLA-4); DCK; dedicator of cytokinesis 2 (Dock2); dedicator of cytokinesis 8 (Dock8); delta like canonical Notch ligand 4 (D114); deltex 1, E3 ubiquitin ligase (Dtx1); deoxyhypusine synthase (Dhps); DGKA; DGKZ; DHX37; dicer 1, ribonuclease type III (Dicer1); dipeptidylpeptidase 4 (Dpp4); discs large MAGUK scaffold protein 1 (Dlg1); DnaJ heat shock protein family (Hsp40) member A3 (Dnaja3); dolichyl-di-phosphooligosaccharide-protein glycotransferase (Ddost); double homeobox B-like 1 (Duxbl1); drosha, ribonuclease type III (Drosha); dual specificity phosphatase 10 (Dusp10); dual specificity phosphatase 22 (Dusp22); dual specificity phosphatase 3 (Dusp3); E74-like factor 4 (Elf4); early growth response 1(Egr1); early growth response 3 (Egr3); ELOB (TCEB2); ENTPD1 (CD39); eomesodermin (Eomes); Eph receptor B4 (Ephb4); Eph receptor B6 (Ephb6); ephrin B1 (Efnb1); ephrin B2 (Efnb2); ephrin B3 (Efnb3); Epstein-Barr virus induced gene 3 (Ebi3); erb-b2 receptor tyrosine kinase (Erbb2); eukaryotic translation initiation factor 2 alpha kinase 4 (Eif2ak4); FADD; family with sequence similarity 49, member B (Fam49b); Fanconi anemia, complementation group A (Fanca); Fanconi anemia, complementation group D2 (Fancd2); Fas (TNF receptor superfamily member 6) (Fas); Fas (TNFRSF6)-associated via death domain (Fadd); Fas Cell Surface Death Receptor (FAS); Fc receptor, IgE, high affinity I, gamma polypeptide (Fcer1g); fibrinogen-like protein 1 (Fgl1); fibrinogen-like protein 2 (Fgl2); FK506 binding protein 1a (Fkbp1a); FK506 binding protein 1b ((Fkbp1b); flotillin 2 (Flot2); FMS-like tyrosine kinase (Flt3); forkhead box J1 (Foxj1); forkhead box N1 (Foxn1); forkhead box P1 (Foxp1); forkhead box P3 (Foxp3); frizzled class receptor 5 (Fzd5); frizzled class receptor 7 (Fzd7); frizzled class receptor 8 (Fzd8); fucosyltransferase 7 (Fut7); Fyn proto-oncogene (Fyn); gap junction protein, alpha 1 (Gja1); GATA binding protein 3 (GATA3); GCN2 kinase (IDO pathway); gelsolin (Gsn); GLI-Kruppel family member GLI3 (Gli3); glycerol-3-phosphate acyltransferase, mitochondrial (Gpam); growth arrest and DNA-damage-inducible 45 gamma (Gadd45g); GTPase, IMAP family member 1 (Gimap1); H1TET2; H2.0-like homeobox (Hlx); haematopoietic 1 (hem1); HCLS1 binding protein 3 (Hs1bp3); heat shock 105 kDa/110 kDa protein 1 (Hsph1); heat shock protein 1 (chaperonin) (Hspd1); heat shock protein 90, alpha (cytosolic), class A member 1 (Hsp90aa1); hematopoietic SH2 domain containing (Hsh2d); hepatitis A virus cellular receptor 2 (Havcr2); hes family bHLH transcription factor 1 (Hes1); histocompatibility 2, class II antigen A, alpha (H2-Aa); histocompatibility 2, class II antigen A, beta 1 (H2-Abl); histocompatibility 2, class II, locus DMa (H2-DMa); histocompatibility 2, M region locus 3 (H3-M3); histocompatibility 2, O region alpha locus (H2-Oa); histocompatibility 2, T region locus 23 (H2-T23); HLA-DR; homeostatic iron regulator (Hfe); icos ligand (Icosl); IKAROS family zinc finger 1 (Ikzf1); IL10; IL10RA; IL2 inducible T cell kinase (Itk); IL6R; Indian hedgehog (Ihh); indoleamine 2,3-dioxygenase 1 (Idol); inducible T cell co-stimulator (Icos); inositol 1,4,5-trisphosphate 3-kinase B (Itpkb); insulin II (Ins2); insulin-like growth factor 1 (Igf1); insulin-like growth factor 2 (Igf2); insulin-like growth factor binding protein 2 (Igfbp2); integrin alpha L (Itgal); integrin alpha M (Itgam); integrin alpha V (Itgav); integrin alpha X (Itgax); integrin beta 2 (Itgb2); integrin, alpha D (Itgad); intercellular adhesion molecule 1 (Icam1); interferon (alpha and beta) receptor 1 (Ifnar1); interferon alpha 1 (Ifna1); interferon alpha 11 (Ifna11); interferon alpha 12 (Ifna12); interferon alpha 13 (Ifna13); interferon alpha 14 (Ifna14); interferon alpha 16 (Ifna16); interferon alpha 2 (Ifna2); interferon alpha 4 (Ifna4); interferon alpha 5 (Ifna5); interferon alpha 6 (Ifna6); interferon alpha 7 (Ifna7); interferon alpha 9 (Ifna9); interferon alpha B (Ifnab); interferon beta 1 (Ifnb1); interferon gamma (IFNg); interferon kappa (Ifnk); interferon regulatory factor 1 (Irf1); interferon regulatory factor 4 (Irf4); interferon zeta (Ifnz); interleukin 1 beta (Il1b; interleukin 1 family, member 8 (Il1f8); interleukin 1 receptor-like 2 (Il1rl2); interleukin 12 receptor, beta1 (Il12rb1); interleukin 12a (Il12a); interleukin 12b (Il12b); interleukin 15 (Il15); interleukin 18 (Il18); interleukin 18 receptor 1 (Il18r1); interleukin 2 (Il2); interleukin 2 receptor, alpha chain (Il2ra); interleukin 2 receptor, gamma chain (Il2rg); interleukin 20 receptor beta (Il20rb); interleukin 21 (Il21); interleukin 23, alpha subunit p19 (Il23a); interleukin 27 (Il27); interleukin 4 (Il4); interleukin 4 receptor, alpha (Il4ra); interleukin 6 (Il6); interleukin 7 (Il7); IRF8; itchy, E3 ubiquitin protein ligase (Itch); jagged 2 (Jag2); jumonji domain containing 6 (Jmjd6); JUNB; junction adhesion molecule like 9 (Jam9); K(lysine) acetyltransferase 2A (Kat2a); KDEL (Lys-Asp-Glu-Leu) endoplasmic reticulum protein retention receptor 1 (Kdelr1); KIT proto-oncogene receptor tyrosine kinase (Kit); LAG-3; LAIR-1 (CD305); LDHA; lectin, galactose binding, soluble 1 (Lgals1); lectin, galactose binding, soluble 3 (Lgals3); lectin, galactose binding, soluble 8 (Lgals8); lectin, galactose binding, soluble 9 (Lgals9); leptin (Lep); leptin receptor (Lepr); leucine rich repeat containing 32 (Lrrc32); leukocyte immunoglobulin-like receptor, subfamily B, member 4A (Lilrb4a); LFNG O-fucosylpeptide 3-beta-N-acetylglucosaminyltransferase (Lfng); LIF; ligase IV, DNA, ATP-dependent (Lig4); LIM domain only 1 (Lmo1); limb region 1 like (Lmbrl); linker for activation of T cells (Lat); lymphocyte antigen 9 (Ly9); lymphocyte cytosolic protein 1 (Lcp1); lymphocyte protein tyrosine kinase (Lck); lymphocyte transmembrane adaptor 1 (Lax1); lymphocyte-activation gene 3 (Lag3); lymphoid enhancer binding factor 1 (Lef1); LYN; lysyl oxidase-like 3 (Loxl3); MAD1 mitotic arrest deficient 1-like 1 (Mad1l1); MALT1 paracaspase (Malt1); MAP4K4; MAPK14; MCJ; mechanistic target of rapamycin kinase (Mtor); MEF2D; Methylation-Controlled J Protein (MCJ); methyltransferase like 3 (Mettl3); MGAT5; MHC I like leukocyte 2 (Mill2); midkine (Mdk); mitogen-activated protein kinase 8 interacting protein 1 (Mapk8ip10); moesin (Msn); myelin protein zero-like 2 (Mpzl2); myeloblastosis oncogene (Myb); myosin, heavy polypeptide 9, non-muscle (Myh9); Nedd4 family interacting protein 1 (Ndfip1); neural precursor cell expressed, developmentally down-regulated 4 (Nedd4); NFATcT; NFATC2; NFATC4; NFKB activating protein (Nkap); nicastrin (Ncstn); NK2 homeobox 3 (Nkx2-3); NLR family, CARD domain containing 3 (Nlrc3); NLR family, pyrin domain containing 3 (Nlrp3); non-catalytic region of tyrosine kinase adaptor protein 1 (Nck1); non-catalytic region of tyrosine kinase adaptor protein 2 (Nck2); non-homologous end joining factor 1 (Nhej1); non-SMC condensin II complex, subunit H2 (Ncaph2); Notch-regulated ankyrin repeat protein (Nrarp); NT5E (CD73); nuclear factor of activated T cells, cytoplasmic, calcineurin dependent (Nfatc3); nuclear factor of kappa light polypeptide gene enhancer in B cells inhibitor, delta (Nfkbid); nuclear receptor co-repressor 1 (Ncor1); ODC1; OTU domain containing 5 (Otud5); OTULINL (FAM105A); paired box 1 (Pax1); PDCD1 (PD1; PD-1); PDIA3; pellino 1 (Peli1); peroxiredoxin 2 (Prdx2); PHD1 (EGLN2); PHD2 (EGLN1); PHD3 (EGLN3); phosphodiesterase 5A, cGMP-specific (Pde5a); phosphoinositide-3-kinase regulatory subunit (Pik3r6); phospholipase A2, group IIA (Pla2g2a); phospholipase A2, group IID (Pla2g2d); phospholipase A2, group IIE (Pla2g2e); phosphoprotein associated with glycosphingolipid microdomains 1 (Pag1); PIK3CD; PIKFYVE; POZ (BTB) and AT hook containing zinc finger 1 (Patz1); PPARa; PPARd; PR domain containing 1, with ZNF domain (Prdm1); presenilin 1 (Psen1); presenilin 2 (Psen2); PRKACA; PRKC, apoptosis, WT1, regulator (Pawr); programmed cell death 1 ligand 2 (Pdcd1lg2); prosaposin (Psap); prostaglandin E receptor 4 (subtype EP4) (Ptger4); protein kinase C, theta 2 (Prkcq); protein kinase C, zeta (Prkcz); protein kinase, cAMP dependent regulatory, type I, alpha (Prkar1a); protein kinase, DNA activated, catalytic polypeptide (Prkdc); protein phosphatase 3, catalytic subunit, beta isoform (Ppp3cb); protein tyrosine phosphatase, non-receptor type 2 (Ptpn2); protein tyrosine phosphatase, non-receptor type 22 (lymphoid) (Ptpn22); protein tyrosine phosphatase, non-receptor type 6 (Ptpn6); protein tyrosine phosphatase, receptor type, C (Ptprc); PTEN; PTPN11; purine-nucleoside phosphorylase (Pnp); purinergic receptor P2X, ligand-gated ion channel, 7 (P2rx7); PVR Related Immunoglobulin Domain Containing (PVRIG; CD112R); PYD and CARD domain containing 7 (Pycard); RAB27A, member RAS oncogene family (Rab27a); RAB29, member RAS oncogene family (Rab29); radical S-adenosyl methionine domain containing 2 (Rsad2); RAR-related orphan receptor alpha (Rora); RAR-related orphan receptor gamma (Ror); RAS guanyl releasing protein 1 (Rasgrp1); ras homolog family member A (Rhoa); ras homolog family member H (Rhoh); RAS protein activator like 3 (Rasal3); RASA2; receptor (TNFRSF)-interacting serine-threonine kinase 2 (Ripk2); recombination activating gene 1 (Rag1); recombination activating gene 2 (Rag2); Regulatory Factor X Associated Ankyrin Containing Protein (RFXANK); RHO family interacting cell polarization regulator 2 (Ripor2); ribosomal protein L22 (Rpl 22); ribosomal protein S6 (Rps6); RING CCCH (C3H) domains 1 (Rc3h1); ring finger and CCCH-type zinc finger domains 2 (Rc3h2); RNF2; runt related transcription factor 1 (Runx1); runt related transcription factor 2 (Runx2); SAM and SH3 domain containing 3 (Sash3); schlafen 1; Selectin P Ligand/P-Selectin Glycoprotein Ligand-1 (SELPG/PSGL1) polypeptide; selenoprotein K (Selenok); sema domain immunoglobulin domain (Ig), transmembrane domain (TM) and short cytoplasmic domain, (semaphorin) 4A (Sema4a); serine/threonine kinase 11 (Stk11); SH3 domain containing ring finger 1 (Sh3rf1); SHP1; sialophorin (Spn); SIGLEC15; signal transducer and activator of transcription 3 (Stat3); signal transducer and activator of transcription 5A (Stat5A); signal transducer and activator of transcription 5B (Stat5B); signal-regulatory protein alpha (Sirpa); Signal-regulatory protein beta 1A (Sirpb1a); Signal-regulatory protein beta 1C (Sirpb1c); SLA; SLAM family member 6 (Slamf6); SLAMF7; SMAD family member 3 (Smad3); SMAD family member 7 (Smad7); SMARCA4; solute carrier family 11 (proton-coupled divalent metal ion transporters), member 1 (Slc11a1); solute carrier family 4 (anion exchanger), member 1; solute carrier family 46, member 2 (Slc46a2); sonic hedgehog (Shh); SOS Ras/Rac guanine nucleotide exchange factor 1 (Sos1); SOS Ras/Rac guanine nucleotide exchange factor 2 (Sos2); special AT-rich sequence binding protein 1 (Satb1); spleen tyrosine kinase (Syk); Sprouty RTK Signaling Antagonist 1 (Spry1); Sprouty RTK Signaling Antagonist 2 (Spry2); squamous cell carcinoma antigen recognized by T cells (Sart1); src homology 2 domain-containing transforming protein B (Shb); Src-like-adaptor 2 (Sla2); SRY (sex determining region Y)-box 4 (Sox4); STK4; suppression inducing transmembrane adaptor 1 (Sit1); suppressor of cytokine signaling 1 (Socs1); suppressor of cytokine signaling 5 (Socs5); suppressor of cytokine signaling 6 (Socs6); surfactant associated protein D (Sftpd); SUV39; syndecan 4 (Sdc4); syntaxin 11 (Stx11); T Cell Immunoglobulin Mucin 3 (Tim-3); T cell immunoreceptor with Ig and ITIM domains (Tigit); T cell receptor alpha joining 18 (Traj18); T Cell Receptor Beta Constant 1 (TRBC1); T Cell Receptor Beta Constant 2 (TRBC2); T cell, immune regulator 1, ATPase, H+ transporting, lysosomal V0 protein A3 (Tcirg1); T cell-interacting, activating receptor on myeloid cells 1 (Tarm1); T-box 21 (Tbx21); TCR; TCR alpha; TCR beta; TCR complex gene sequence; Tet Methylcytosine Dioxygenase 2 (TET2); TGFbRII; TGFbRII (TGFBR2); three prime repair exonuclease 1 (Trex1); thymocyte selection associated (Themis); thymus cell antigen 1, theta (Thy 1); TMEM222; TNF receptor-associated factor 6 (Traf6); TNFAIP3; TNFRSF10B; TNFRSF8 (CD30); TOX; TOX2; TRAC; transformation related protein 53 (Trp53); Transforming Growth Factor Beta Receptor II (TGFbRII); transforming growth factor, beta receptor II (Tgfbr2); transmembrane 131 like (Tmem131l); transmembrane protein 98 (Tmem98); triggering receptor expressed on myeloid cells-like 2 (Treml2); TSC complex subunit 1 (Tsc1); tumor necrosis factor (ligand) superfamily, member 11 (Tnfsf11); tumor necrosis factor (ligand) superfamily, member 13b (Tnfsf13b); tumor necrosis factor (ligand) superfamily, member 4 (Tnfsf4); tumor necrosis factor (ligand) superfamily, member 9 (Tnfsf9); tumor necrosis factor receptor superfamily, member 13c (Tnfrsf13c); tumor necrosis factor receptor superfamily, member 4 (Tnfrsf4); tumor necrosis factor, alpha-induced protein 8-like 2 (Tnfa1p8l2); twisted gastrulation BMP signaling modulator 1 (Twsg1); UBASH3A; vanin 1 (Vnn1); vascular cell adhesion molecule 1 (Vcam1); VHL; v-maf musculoaponeurotic fibrosarcoma oncogene family, protein B (avian) (Mafb); V-set and immunoglobulin domain containing 4 (Vsig4); V-Set Immunoregulatory Receptor (VISTA); WD repeat and FYVE domain containing 4 (Wdfy4); wingless-type MMTV integration site family, member 1 (Wnt1); wingless-type MMTV integration site family, member 4 (Wnt4); WNT signaling pathway regulator (Apc); WW domain containing E3 ubiquitin protein ligase 1 (Wwp1); XBP1; YAP1; ZAP70; ZC3H12A; zfp35; zinc finger and BTB domain containing 1 (Zbtb1); zinc finger and BTB domain containing 7B (Zbtb7B); zinc finger CCCH type containing 12A (Zc3h12a); zinc finger CCCH type containing 12D (Zc3h12d); zinc finger E-box binding homeobox 1 (Zeb1); zinc finger protein 36, C3H type (Zfp36); zinc finger protein 36, C3H type-like 1 (Zfp36L1); zinc finger protein 36, C3H type-like 2 (Zfp36L2); and zinc finger protein 683 (Zfp683).

[0270] Immune cells and/or immune effector cells can be isolated or purified from a sample collected from a subject/donor using standard techniques known in the art. For example, immune effector cells can be isolated or purified from a whole blood sample by lysing red blood cells and removing peripheral mononuclear blood cells by centrifugation. The immune effector cells can be further isolated or purified using a selective purification method that isolates the immune effector cells based on cell-specific markers such as CD25, CD3, CD4, CD8, CD28, CD45RA, or CD45RO. In one embodiment, CD4⁺ is used as a marker to select T cells. In one embodiment, CD8⁺ is used as a marker to select T cells. In one embodiment, CD4⁺ and CD8⁺ are used as a marker to select regulatory T cells.

[0271] In another embodiment, the present disclosure provides T cells that have targeted gene knock-outs at the TCR constant region (TRAC), which is responsible for TCRαβ surface expression. TCRαβ-deficient CAR-T cells are compatible with allogeneic immunotherapy (Qasim et al., Sci. Transl. Med. 9, eaaj2013 (2017); Valton et al., Mol Ther. 2015 September; 23(9): 1507-1518). If desired, residual TCRαβ T cells are removed using CliniMACS magnetic bead depletion to minimize the risk of GVHD. In another embodiment, the present disclosure provides donor T cells selected ex vivo to recognize minor histocompatibility antigens expressed on recipient hematopoietic cells, thereby minimizing the risk of graft-versus-host disease (GVHD), which is the main cause of morbidity and mortality after transplantation (Warren et al., Blood 2010; 115(19):3869-3878).

[0272] Another technique for isolating or purifying immune effector cells is flow cytometry. In fluorescence activated cell sorting a fluorescently labelled antibody with affinity for an immune effector cell marker is used to label immune effector cells in a sample. A gating strategy appropriate for the cells expressing the marker is used to segregate the cells. For example, T lymphocytes can be separated from other cells in a sample by using, for example, a fluorescently labeled antibody specific for an immune effector cell marker (e.g., CD4, CD8, CD28, CD45) and corresponding gating strategy. In one embodiment, a CD4 gating strategy is employed. In one embodiment, a CD8 gating strategy is employed. In one embodiment, a CD4 and CD8 gating strategy is employed. In some embodiments, a gating strategy for other markers specific to an immune effector cell is employed instead of, or in combination with, the CD4 and/or CD8 gating strategy.

[0273] In embodiments, the immune effector cells contemplated in the present disclosure are effector T cells. In some embodiments, the effector T cell is a naïve CD8⁺ T cell, a cytotoxic T cell, a natural killer T (NKT) cell, a natural killer (NK) cell, or a regulatory T (T_{reg}) cell. In some embodiments, the effector T cells are thymocytes, immature T lymphocytes, mature T lymphocytes, resting T lymphocytes, or activated T lymphocytes. In some embodiments the immune effector cell is a CD4⁺ CD8⁺ T cell or a CD4⁻ CD8⁻ T cell. In some embodiments the immune effector cell is a T helper cell. In some embodiments the T helper cell is a T helper 1 (Th1), a T helper 2 (Th2) cell, or a helper T cell expressing CD4 (CD4+ T cell). In some embodiments, immune effector cells are effector NK cells. In some embodiments, the immune effector cell is any other subset of T cells. The modified immune effector cell may express, in addition to the chimeric antigen receptor (CAR), an exogenous cytokine, a different chimeric receptor, or any other agent that would enhance immune effector cell signaling or function. For example, co-expression of the chimeric antigen receptor and a cytokine may enhance the CAR-T cell's ability to lyse a target cell.

[0274] Provided herein are also polynucleotides that encode the chimeric antigen receptors (CARs) described herein. In some embodiments, the nucleic acid molecule is isolated or purified. Delivery of the nucleic acid molecules ex vivo can be accomplished using methods known in the art. For example, immune cells obtained from a subject may be transformed with a nucleic acid vector encoding the chimeric antigen receptor. The vector may then be used to transform recipient immune cells so that these cells will then express the chimeric antigen receptor. Efficient means of transforming immune cells include transfection and transduction. Such methods are well known in the art. For example, applicable methods for delivery the nucleic acid molecule encoding the chimeric antigen receptor (and the nucleic acid(s) encoding the base editor) can be found in International Application No. PCT/US2009/040040 and U.S. Pat. Nos. 8,450,112; 9,132,153; and 9,669,058, each of which is incorporated herein in its entirety. Additionally, those methods and vectors described herein for delivering the nucleic acid encoding the base editor are applicable to delivering the nucleic acid encoding the chimeric antigen receptor.

[0275] Some aspects of the present disclosure provide for immune cells comprising a chimeric antigen receptor (CAR) and an altered endogenous gene that provides resistance to development of an exhausted phenotype after repeated or continuous exposure to an antigen and/or increased persistence, resistance to fratricide, enhances immune cell function, resistance to immunosuppression or inhibition, or a combination thereof. In some embodiments, the altered endogenous gene may be created by base editing. In some embodiments, the base editing may reduce or attenuate the gene expression. In some embodiments, the base editing may reduce or attenuate the gene activation. In some embodiments, the base editing may reduce or attenuate the functionality of the gene product. In some other embodiments, the base editing may activate or enhance the gene expression. In some embodiments, the base editing may increase the functionality of the gene product. In some embodiments, the altered endogenous gene may be modified or edited in a start codon, an exon, an intron, a splice acceptor site, a splice donor site, an exon-intron injunction, or a regulatory element thereof. The modification may be edit to a single nucleobase in a gene or a regulatory element thereof. The modification may be in a exon, more than one exons, an intron, or more than one introns, or a combination thereof. The modification may be in an open reading frame of a gene. The modification may be in an untranslated region of the gene, for example, a 3′-UTR or a 5′-UTR. In some embodiments, the modification is in a regulatory element of an endogenous gene. In some embodiments, the modification is in a promoter, an enhancer, an operator, a silencer, an insulator, a terminator, a transcription initiation sequence, a translation initiation sequence (e.g., a Kozak sequence), or any combination thereof.

[0276] Immune effector cells expressing an endogenous immune cell receptor and a chimeric antigen receptor (CAR) may recognize and attack host cells, a circumstance termed graft versus host disease (GVHD). The alpha component of the immune cell receptor complex is encoded by the TRAC gene, and in some embodiments, this gene is edited such that the alpha subunit of the TCR complex is nonfunctional or absent. Because this subunit is necessary for endogenous immune cell signaling, editing this gene can reduce the risk of graft versus host disease caused by allogeneic immune cells.

[0277] In some embodiments, editing of genes to provide resistance to development of an exhausted phenotype after repeated or continuous exposure to an antigen, increased persistence, fratricide resistance, enhance the function of the immune cell or to reduce immunosuppression or inhibition can occur in the immune cell before the cell is transformed to express a chimeric antigen receptor (CAR). In other aspects, editing of genes to provide resistance to development of an exhausted phenotype after repeated or continuous exposure to an antigen, increase persistence, provide fratricide resistance, enhance the function of the immune cell or to reduce immunosuppression or inhibition can occur in a CAR-T cell, i.e., after the immune cell has been transformed to express a chimeric antigen receptor (CAR).

[0278] In some embodiments, the immune cell may comprise one or more edited genes, one or more regulatory elements thereof, or combinations thereof, wherein expression of the edited gene is either knocked out or knocked down. In some embodiments, the immune cell may comprise one or more edited genes, one or more regulatory elements thereof, or combinations thereof, wherein expression of the edited gene is increased. In some embodiments, the immune cell may comprise a chimeric antigen receptor (CAR) and one or more edited genes, one or more regulatory elements thereof, or combinations thereof, wherein expression of the edited gene is either knocked out or knocked down. In some embodiments, the immune cell may comprise a chimeric antigen receptor (CAR) and one or more edited genes, one or more regulatory elements thereof, or combinations thereof, wherein expression of the edited gene is increased.

[0279] In some embodiments, the CAR-T cells have reduced (e.g., a negative alteration of at least 10%, 25%, 50%, 75%, or 100%) or inactivated surface HLA class-I expression as compared to a similar CAR-T cell lacking one or more edited genes as described herein. In some embodiments, the CAR-T cells have resistance to development of an exhausted phenotype after repeated or continuous exposure to an antigen as compared to a similar CAR-T cell lacking one or more edited genes as described herein. In some embodiments, the CAR-T cells have increased persistence as compared to a similar CAR-T cell lacking one or more edited genes as described herein. In some embodiments, the CAR-T cells have increased fratricide resistance as compared to a similar CAR-T cell lacking one or more edited genes as described herein. In some embodiments, the CAR-T cells have reduced immunogenicity as compared to a similar CAR-T cell lacking one or more edited genes as described herein. In some embodiments, the CAR-T cells have lower activation threshold as compared to a similar CAR-T lacking one or more edited genes as described herein. In some embodiments, the CAR-T cells have increased anti-neoplasia activity as compared to a similar CAR-T cell lacking one or more edited genes as described herein. In some embodiments, the CAR-T cells have increased T- and/or NK-cell resistance as compared to a similar CAR-T cell lacking one or more edited genes as described herein. The one or more genes may be edited by base editing. In some embodiments the one or more genes are directed to components of the peptide loading complex (PLC) or regulatory components thereof. In some embodiments the one or more genes may be selected from a group consisting of: β2M, TAP1, TAP2, Tapasin, and CD58. In some embodiments, the one or more genes may be selected from the group consisting of CBLB, CD5, Chop, CISH, DCK, DGKα/ζ, DHX37, DNMT3A, EIF2A, FLI-1, ID3, IKZF2, IL-6, PFN1, PRDM1, PRKACA, PTP1B, PTPN6, RASA2, Regnase-1, Roquin-1, SOCS1, SOX4, TLE, TMEM184B, and TMEM222. In some embodiments, the one or more genes are selected from the group consisting of B2M, CD3e, CD3g, CIITA, PD1, and TRAC. In embodiments, the gene corresponds to an antigen targeted by a CAR expressed by the cell. In some the genes may be edited by base editing and or using a nuclease (e.g., Cas12b). In some cases, the one or more genes are selected from CD58, CD115, CD48, MICA, MICB, Nectin-2, ULBP, β2M, TAP1, TAP2, TAPBP, PDIA3, NLRC5, HLA-A, HLA-B, and/or HLA-C. In some embodiments, one or more additional genes may be edited using a base editor or nuclease. In some embodiments, the one or more additional genes may be selected from TRAC and CIITA. In some embodiments, the one or more additional genes edited may be selected from HLA-E, HLA-G, PD-L1, and CD47. In some embodiments, one or more of β2M, TAP1, TAP2, Tapasin, and/or CD58 are edited in combination with edits in each of HLA-E, HLA-G, PD-L1, and CD47.

[0280] In some embodiments, the one or more genes are selected from CD5, CD7, CD19, B2M, CD3γ, CIITA, CD38, and PD1. In some embodiments, the CAR-T cells contain modifications in genes encoding one or more of CD5, CD7, CD19, B2M, CD3γ, CIITA, CD38, and PD1. In some embodiments, the CAR-T cells have reduced or undetectable expression of one or more of CD5, CD7, CD19, B2M, CD3γ, CIITA, CD38, and PD1 relative to a wild type or unedited T cell.

[0281] In some embodiments, an immune cell comprises a chimeric antigen receptor and one or more edited genes, a regulatory element thereof, or combinations thereof. An edited gene may be an immune response regulation gene, an immunogenic gene, a checkpoint inhibitor gene, a gene involved in immune responses, a cell surface marker, e.g., a T cell surface marker, or any combination thereof. In some embodiments, an immune cell comprises a chimeric antigen receptor and an edited gene that is associated with activated T cell proliferation, alpha-beta T cell activation, gamma-delta T cell activation, positive regulation of T cell proliferation, negative regulation of T-helper cell proliferation or differentiation, or their regulatory elements thereof, or combinations thereof. In some embodiments, the edited gene may be a checkpoint inhibitor gene, for example, such as a PD1 gene, a PDC1 gene, or a member related to or regulating the pathway of their formation or activation.

[0282] In some embodiments, provided herein is an immune cell with an edited gene in the peptide loading complex (PLC) or a regulatory element thereof, such that the immune cell does not express or expresses at reduced levels surface HLA class-I peptides. In some embodiments, provided herein is an immune cell with an edited gene in the peptide loading complex (PLC) or a regulatory element thereof, such that the immune cell has increased persistence. In some embodiments, the immune cell comprises an edited gene in the peptide loading complex (PLC) or a regulatory element thereof, and additionally, at least one edited gene.

[0283] In some embodiments, provided herein is an immune cell (e.g., T- or NK-cell) with an edited β2M gene, such that the immune cell does not express an endogenous functional Beta-2-microglobulin. In some embodiments, provided herein is an immune cell with an edited β2M gene, such that the immune cell does not express or expresses at reduced levels surface HLA class-I peptides. In some embodiments, provided herein is an immune cell with an edited β2M gene, such that the immune cell has increased persistence. In some embodiments, the immune cell comprises an edited β2M gene, and additionally, at least one edited gene.

[0284] In some embodiments, provided herein is an immune cell (e.g., T- or NK-cell) with an edited TAP1 gene, such that the immune cell does not express an endogenous functional TAP1. In some embodiments, provided herein is an immune cell with an edited TAP1 gene, such that the immune cell does not express or expresses at reduced levels surface HLA class-I peptides. In some embodiments, provided herein is an immune cell with an edited TAP1 gene, such that the immune cell has increased persistence. In some embodiments, the immune cell comprises an edited TAP1 gene, and additionally, at least one edited gene.

[0285] In some embodiments, provided herein is an immune cell (e.g., T- or NK-cell) with an edited TAP2 gene, such that the immune cell does not express an endogenous functional TAP2. In some embodiments, provided herein is an immune cell with an edited TAP2 gene, such that the immune cell does not express or expresses at reduced levels surface HLA class-I peptides. In some embodiments, provided herein is an immune cell with an edited TAP2 gene, such that the immune cell has increased persistence. In some embodiments, the immune cell comprises an edited TAP2 gene, and additionally, at least one edited gene.

[0286] In some embodiments, provided herein is an immune cell (e.g., T- or NK-cell) with edited TAP1 and TAP2 genes, such that the immune cell does not express endogenous functional TAP1 and TAP2. In some embodiments, provided herein is an immune cell with edited TAP1 and TAP2 genes, such that the immune cell does not express or expresses at reduced levels surface HLA class-I peptides. In some embodiments, provided herein is an immune cell with an edited TAP1 and TAP2 gene, such that the immune cell has increased persistence. In some embodiments, the immune cell comprises an edited TAP1 and TAP2 gene, and additionally, at least one edited gene.

[0287] In some embodiments, provided herein is an immune cell (e.g., T- or NK-cell) with an edited Tapasin gene, such that the immune cell does not express an endogenous functional Tapasin. In some embodiments, provided herein is an immune cell with an edited Tapasin gene, such that the immune cell does not express or expresses at reduced levels surface HLA class-I peptides. In some embodiments, provided herein is an immune cell with an edited Tapasin gene, such that the immune cell has increased persistence. In some embodiments, the immune cell comprises an edited Tapasin gene, and additionally, at least one edited gene.

[0288] In some embodiments, provided herein is an immune cell (e.g., T- or NK-cell) with an edited CD58 gene, such that the immune cell does not express an endogenous functional CD58. In some embodiments, provided herein is an immune cell with an edited CD58 gene, such that the immune cell has increased persistence. In some embodiments, the immune cell comprises an edited CD58 gene, and additionally, at least one edited gene.

[0289] In some embodiments, each edited gene may comprise a single base edit. In some embodiments, each edited gene may comprise multiple base edits at different regions of the gene. In some embodiments, a single modification event (such as electroporation), may introduce one or more gene edits. In some embodiments at least one, two, three, four, five, six, seven, eight, nine, ten, eleven, twelve, thirteen, fourteen, fifteen, sixteen, seventeen, eighteen, nineteen, twenty or more edits may be introduced in one or more genes simultaneously. In some embodiments, an immune cell, including but not limited to any immune cell comprising an edited gene selected from any of the aforementioned gene edits, can be edited to generate mutations in other genes that enhance the CAR-T's function or reduce immunosuppression or inhibition of the cell.

### Chimeric Antigen Receptors and CAR-T Cells

[0290] The disclosure provides immune cells modified using nucleobase editors described herein and that express chimeric antigen receptors (CARs). Modification of immune cells to express a chimeric antigen receptor can enhance an immune cell's immunoreactive activity, wherein the chimeric antigen receptor has an affinity for an epitope on an antigen, wherein the antigen is associated with an altered fitness of an organism. For example, the chimeric antigen receptor can have an affinity for an epitope on a protein expressed in a neoplastic cell. Because the CAR-T cells can act independently of major histocompatibility complex (MHC), activated CAR-T cells can kill the neoplastic cell expressing the antigen. The direct action of the CAR-T cell evades neoplastic cell defensive mechanisms that have evolved in response to MHC presentation of antigens to immune cells. Exemplary chimeric antigen receptors, modified immune cells, and methods for preparing the same are described in PCT Applications No. PCT/US2020/013964, PCT/US2020/052822, PCT/US2020/018178, PCT/US2021/52035, and PCT/US2022/075021, or in Hardke-Wolenski, et al., Biomedicines 10:1493 (2022), the disclosures of which are incorporated herein by reference in their entirety for all purposes.

[0291] However, target antigens associated with neoplastic cells may also be expressed on healthy immune cells. Accordingly, activated CAR-T cells not only kill neoplastic cells expressing the target antigen but also healthy immune cells that also express the target antigen. To prevent this fratricide or self-killing of immune cells, the disclosure provides a CAR-T that has been modified using nucleobase editors to reduce or eliminate the expression of a target antigen (e.g., CD19) to provide fratricide resistance. In some embodiments, the disclosure provides a fratricide resistant modified immune effector cell that expresses a chimeric antigen receptor to target a neoplastic cell.

[0292] Some embodiments comprise autologous immune cell immunotherapy, wherein immune cells are obtained from a subject having a disease or altered fitness characterized by cancerous or otherwise altered cells expressing a surface marker. The obtained immune cells are genetically modified to express a chimeric antigen receptor and are effectively redirected against specific antigens. Thus, in some embodiments, immune cells are obtained from a subject in need of CAR-T immunotherapy. In some embodiments, these autologous immune cells are cultured and modified shortly after they are obtained from the subject. In other embodiments, the autologous cells are obtained and then stored for future use. This practice may be advisable for individuals who may be undergoing parallel treatment that will diminish immune cell counts in the future. In allogeneic immune cell immunotherapy, immune cells can be obtained from a donor other than the subject who will be receiving treatment. In some embodiments, immune cells are obtained from a healthy subject or donor and are genetically modified to express a chimeric antigen receptor and are effectively redirected against specific antigens. The immune cells, after modification to express a chimeric antigen receptor, are administered to a subject for treating a disease, such as a neoplasia (e.g., T- or NK-cell malignancy) or autoimmune disease. In some embodiments, immune cells to be modified to express a chimeric antigen receptor can be obtained from pre-existing stock cultures of immune cells.

[0293] Immune cells and/or immune effector cells can be isolated or purified from a sample collected from a subject or a donor using standard techniques known in the art. For example, immune effector cells can be isolated or purified from a whole blood sample by lysing red blood cells and removing peripheral mononuclear blood cells by centrifugation. The immune effector cells can be further isolated or purified using a selective purification method that isolates the immune effector cells based on cell-specific markers such as CD25, CD3, CD4, CD8, CD28, CD45RA, or CD45RO. In one embodiment, CD4⁺ is used as a marker to select T cells. In one embodiment, CD8⁺ is used as a marker to select T cells. In one embodiment, CD4⁺ and CD8⁺ are used as a marker to select regulatory T cells.

[0294] In another embodiment, the disclosure provides T cells that have targeted gene knockouts at the TCR constant region (TRAC), which is responsible for TCRαβ surface expression. TCRαβ-deficient CAR-T cells are compatible with allogeneic immunotherapy (Qasim et al., Sci. Transl. Med. 9, eaaj2013 (2017); Valton et al., Mol Ther. 2015 September; 23(9): 1507-1518). If desired, residual TCRαβ T cells are removed using CliniMACS magnetic bead depletion to minimize the risk of GVHD. In another embodiment, the disclosure provides donor T cells selected ex vivo to recognize minor histocompatibility antigens expressed on recipient hematopoietic cells, thereby minimizing the risk of graft-versus-host disease (GVHD), which is the main cause of morbidity and mortality after transplantation (Warren et al., Blood 2010; 115(19):3869-3878). Another technique for isolating or purifying immune effector cells is flow cytometry. In fluorescence activated cell sorting a fluorescently labelled antibody with affinity for an immune effector cell marker is used to label immune effector cells in a sample. A gating strategy appropriate for the cells expressing the marker is used to segregate the cells. For example, T lymphocytes can be separated from other cells in a sample by using, for example, a fluorescently labeled antibody specific for an immune effector cell marker (e.g., CD4, CD8, CD28, CD45) and corresponding gating strategy. In one embodiment, a CD4 gating strategy is employed. In one embodiment, a CD8 gating strategy is employed. In one embodiment, a CD4 and CD8 gating strategy is employed. In some embodiments, a gating strategy for other markers specific to an immune effector cell is employed instead of, or in combination with, the CD4 and/or CD8 gating strategy.

[0295] The immune effector cells contemplated in the disclosure include effector T cells. In some embodiments, the effector T cell is a naïve CD8⁺ T cell, a cytotoxic T cell, a natural killer T (NKT) cell, a natural killer (NK) cell, or a regulatory T (Treg) cell. In some embodiments, the effector T cells are thymocytes, immature T lymphocytes, mature T lymphocytes, resting T lymphocytes, or activated T lymphocytes. In some embodiments the immune effector cell is a CD4⁺ CD8⁺ T cell or a CD4⁻ CD8⁻ T cell. In some embodiments the immune effector cell is a T helper cell. In some embodiments the T helper cell is a T helper 1 (Th1), a T helper 2 (Th2) cell, or a helper T cell expressing CD4 (CD4+ T cell). In some embodiments, immune effector cells are effector NK cells. In some embodiments, the immune effector cell is any other subset of T cells. The modified immune effector cell may express, in addition to the chimeric antigen receptor, an exogenous cytokine, a different chimeric receptor, or any other agent that would enhance immune effector cell signaling or function. For example, co-expression of the chimeric antigen receptor and a cytokine may enhance the CAR-T cell's ability to lyse a target cell.

[0296] Chimeric antigen receptors as contemplated in the present disclosure comprise an extracellular binding domain, a transmembrane domain, and an intracellular domain. Binding of an antigen to the extracellular binding domain can activate the CAR-T cell and generate an effector response, which includes CAR-T cell proliferation, cytokine production, and other processes that lead to the death, inactivation, and/or neutralization of the antigen expressing cell. In some embodiments of the present disclosure, the chimeric antigen receptor further comprises a linker. In some embodiments, the linker is a (GGGGS)ₙ linker (SEQ ID NO: 274). In some embodiments, the linker is a (GGGGS)₃ linker (SEQ ID NO: 679). In some embodiments, a CAR of the present disclosure includes a leader peptide sequence (e.g., N-terminal to the antigen binding domain). An exemplary leader peptide amino acid sequence is: METDTLLLWVLLLWVPGSTG (SEQ ID NO: 680).

[0297] In various embodiments, the CAR-T specifically targets a cluster of differentiation 19 (CD19) polypeptide. In some embodiments, the CAR-T specifically targets CD5, CD7, CD19, CD20, CD22, CD79B, or ROR1.

[0298] Provided herein are also nucleic acids that encode the chimeric antigen receptors described herein. In some embodiments, the nucleic acid is isolated or purified. Delivery of the nucleic acids ex vivo can be accomplished using methods known in the art. For example, immune cells obtained from a subject may be transformed with a nucleic acid vector encoding the chimeric antigen receptor. The vector may then be used to transform recipient immune cells so that these cells will then express the chimeric antigen receptor. Efficient means of transforming immune cells include transfection and transduction. Such methods are well known in the art. For example, applicable methods for delivery the nucleic acid molecule encoding the chimeric antigen receptor (and the nucleic acid(s) encoding the base editor) can be found in International Application No. PCT/US2009/040040 and U.S. Pat. Nos. 8,450,112; 9,132,153; and 9,669,058, each of which is incorporated herein in its entirety. Additionally, those methods and vectors described herein for delivering the nucleic acid encoding the base editor are applicable to delivering the nucleic acid encoding the chimeric antigen receptor.

[0299] Some aspects of the present disclosure provide for immune cells comprising a chimeric antigen and an altered endogenous gene that provides a reduced tendency relative to unedited CAR-T cells to develop an exhausted phenotype after being stimulated by multiple antigen exposures or continuous exposure to an antigen, resistance to fratricide, enhances immune cell function, resistance to immunosuppression or inhibition, or a combination thereof. In some embodiments, the altered endogenous gene may be created by base editing. In some embodiments, the base editing may reduce or attenuate the gene expression. In some embodiments, the base editing may reduce or attenuate the gene activation. In some embodiments, the base editing may reduce or attenuate the functionality of the gene product. In some other embodiments, the base editing may activate or enhance the gene expression. In some embodiments, the base editing may increase the functionality of the gene product. In some embodiments, the altered endogenous gene may be modified or edited in an exon, an intron, an exon-intron injunction, or a regulatory element thereof. The modification may be edit to a single nucleobase in a gene or a regulatory element thereof. The modification may be in a exon, more than one exons, a start codon, a splice acceptor site, a splice donor site, an intron, or more than one introns, or a combination thereof. The modification may be in an open reading frame of a gene. The modification may be in an untranslated region of the gene, for example, a 3′-UTR or a 5′5′-UTR. In some embodiments, the modification is in a regulatory element of an endogenous gene. In some embodiments, the modification is in a promoter, an enhancer, an operator, a silencer, an insulator, a terminator, a transcription initiation sequence, a translation initiation sequence (e.g., a Kozak sequence), or any combination thereof.

[0300] Allogeneic immune cells expressing an endogenous immune cell receptor as well as a chimeric antigen receptor may recognize and attack host cells, a circumstance termed graft versus host disease (GVHD). The alpha component of the immune cell receptor complex is encoded by the TRAC gene, and in some embodiments, this gene is edited such that the alpha subunit of the TCR complex is nonfunctional or absent. Because this subunit is necessary for endogenous immune cell signaling, editing this gene can reduce the risk of graft versus host disease caused by allogeneic immune cells.

[0301] In some embodiments, editing of genes to provide a reduced tendency relative to unedited CAR-T cells to develop an exhausted phenotype after being stimulated by multiple antigen exposures or continuous exposure to an antigen, fratricide resistance, enhance the function of the immune cell or to reduce immunosuppression or inhibition can occur in the immune cell before the cell is transformed to express a chimeric antigen receptor. In other aspects, editing of genes to provide a reduced tendency relative to unedited CAR-T cells to develop an exhausted phenotype after being stimulated by multiple antigen exposures or continuous exposure to an antigen, fratricide resistance, enhance the function of the immune cell or to reduce immunosuppression or inhibition can occur in a CAR-T cell, i.e., after the immune cell has been transformed to express a chimeric antigen receptor.

[0302] In some embodiments, the immune cell may comprise a chimeric antigen receptor (CAR) and one or more edited genes (e.g., those genes listed herein), one or more regulatory elements thereof, or combinations thereof, wherein expression of the edited gene is either knocked out or knocked down. In some embodiments, the CAR-T cells have a reduced tendency to develop an exhausted phenotype after being stimulated by multiple antigen exposures or continuous exposure to an antigen as compared to a similar reference CAR-T cell not having the one or more edited genes as described herein. In some embodiments, the CAR-T cells have increased fratricide resistance as compared to a similar reference CAR-T cell not having the one or more edited genes as described herein. In some embodiments, the CAR-T cells have reduced immunogenicity as compared to a similar CAR-T cell but without further having the one or more edited genes as described herein. In some embodiments, the CAR-T cells have lower activation threshold as compared to a similar reference CAR-T not having the one or more edited genes as described herein. In some embodiments, the CAR-T cells have increased anti-neoplasia activity as compared to a similar reference CAR-T cell not having the one or more edited genes as described herein. The one or more genes may be edited by base editing.

[0303] In some embodiments, an immune cell comprises a chimeric antigen receptor and one or more edited genes, a regulatory element thereof, or combinations thereof. An edited gene may be an immune response regulation gene, an immunogenic gene, a checkpoint inhibitor gene, a gene involved in immune responses, a cell surface marker, e.g., a T cell surface marker, or any combination thereof. In some embodiments, an immune cell comprises a chimeric antigen receptor and an edited gene that is associated with activated T cell proliferation, alpha-beta T cell activation, gamma-delta T cell activation, positive regulation of T cell proliferation, negative regulation of T-helper cell proliferation or differentiation, or their regulatory elements thereof, or combinations thereof. In some embodiments, the edited gene may be a checkpoint inhibitor gene, such as a PD-1 gene, or a member related to or regulating the pathway of their formation or activation.

[0304] In some embodiments, provided herein is an immune cell with an edited gene (e.g., CD5, CD7, CD19, CD3e, CD3g, B2M, and/or CIITa), such that the immune cell does not express an endogenous functional polypeptide encoded by the gene. In some embodiments, provided herein is a CAR-T cell with an edited gene, such that the CAR-T cell exhibits reduced or negligible expression or no expression of endogenous polypeptide encoded by the gene. In embodiments, the gene encodes CD5, CD7, CD19, CD3e, CD3g, B2M, and/or CIITa.

[0305] In some embodiments, each edited gene may comprise a single base edit. In some embodiments, each edited gene may comprise multiple base edits at different regions of the gene. In some embodiments, a single modification event (such as electroporation), may introduce one or more gene edits. In some embodiments at least one, two, three, four, five, six, seven, eight, nine, ten, eleven, twelve, thirteen, fourteen, fifteen, sixteen, seventeen, eighteen, nineteen, twenty or more edits may be introduced in one or more genes simultaneously. In some embodiments, an immune cell, including but not limited to any immune cell comprising an edited gene selected from any of the aforementioned gene edits, can be edited to generate mutations in other genes that enhance the CAR-T's function or reduce immunosuppression or inhibition of the cell.

### Extracellular Binding Domain

[0306] The chimeric antigen receptors of the disclosure include an extracellular binding domain. The extracellular binding domain of a chimeric antigen receptor contemplated herein comprises an amino acid sequence of an antibody, or an antigen binding fragment thereof, that has an affinity for a specific antigen. In some embodiments, the antigen is a cluster of differentiation 19 (CD19) polypeptide, or a fragment thereof.

[0307] In some embodiments the chimeric antigen receptor comprises an amino acid sequence of an antibody. In some embodiments, the chimeric antigen receptor comprises the amino acid sequence of an antigen binding fragment of an antibody. The antibody (or fragment thereof) portion of the extracellular binding domain recognizes and binds to an epitope of an antigen. In some embodiments, the antibody fragment portion of a chimeric antigen receptor is a single chain variable fragment (scFv). An scFv comprises the light and variable fragments of a monoclonal antibody. In other embodiments, the antibody fragment portion of a chimeric antigen receptor is a multichain variable fragment, which comprises more than one extracellular binding domains and therefore bind to more than one antigen simultaneously. In a multiple chain variable fragment embodiment, a hinge region may separate the different variable fragments, providing necessary spatial arrangement and flexibility.

[0308] In some embodiments, the extracellular binding domain is an anti-CD19 scFv. In some cases, the extracellular binding domain is an anti-CD5, anti-CD7, anti-CD19, anti-CD20, anti-CD22, anti-CD79B, or anti-ROR1 scFv.

[0309] In other embodiments, the antibody portion of a chimeric antigen receptor comprises at least one heavy chain and at least one light chain. In some embodiments, the antibody portion of a chimeric antigen receptor comprises two heavy chains, joined by disulfide bridges and two light chains, wherein the light chains are each joined to one of the heavy chains by disulfide bridges. In some embodiments, the light chain comprises a constant region and a variable region. Complementarity determining regions residing in the variable region of an antibody are responsible for the antibody's affinity for a particular antigen. Thus, antibodies that recognize different antigens comprise different complementarity determining regions. Complementarity determining regions reside in the variable domains of the extracellular binding domain, and variable domains (i.e., the variable heavy and variable light) can be linked with a linker or, in some embodiments, with disulfide bridges. In some embodiments, the variable heavy chain and variable light chain are linked by a (GGGGS)ₙ linker (SEQ ID NO: 274), wherein the n is an integer from 1 to 10. In some embodiments, the linker is a (GGGGS)₃ linker (SEQ ID NO: 679).

[0310] In some embodiments, the antigen recognized and bound by the extracellular domain is a protein or peptide, a nucleic acid, a lipid, or a polysaccharide. Antigens can be heterologous, such as those expressed in a pathogenic bacteria or virus. Antigens can also be synthetic; for example, some individuals have extreme allergies to synthetic latex and exposure to this antigen can result in an extreme immune reaction. In some embodiments, the antigen is autologous, and is expressed on a diseased or otherwise altered cell.

[0311] For example, in some embodiments, the antigen is expressed in a neoplastic cell. In some embodiments, the neoplastic cell is a malignant T-, B-, or NK-cell. In some embodiments, the malignant T-, B-, or NK-cell is a malignant precursor T-, B-, or NK-cell. In some embodiments, the malignant T-, B-, or NK-cell is a malignant mature T-, B-, or NK-cell. Nonlimiting examples of neoplasia include B cell lymphoma, mantle cell lymphoma, T-cell acute lymphoblastic leukemia (T-ALL), mycosis fungoides (MF), Sézary syndrome (SS), Peripheral T/NK-cell lymphoma, Anaplastic large cell lymphoma ALK+, Primary cutaneous T-cell lymphoma, T-cell large granular lymphocytic leukemia, Angioimmunoblastic T/NK-cell lymphoma, Hepatosplenic T-cell lymphoma, Primary cutaneous CD30+lymphoproliferative disorders, Extranodal NK/T-cell lymphoma, Adult T-cell leukemia/lymphoma, T-cell prolymphocytic leukemia, Subcutaneous panniculitis-like T-cell lymphoma, Primary cutaneous gamma-delta T-cell lymphoma, Aggressive NK-cell leukemia, and Enteropathy-associated T-cell lymphoma.

[0312] Antibody-antigen interactions are noncovalent interactions resulting from hydrogen bonding, electrostatic or hydrophobic interactions, or from van der Waals forces. The affinity of extracellular binding domain of the chimeric antigen receptor for an antigen can be calculated with the following formula:

$${K}_{A} = [ Antibody - Antigen ] / [ Antibody ] [ Antigen ] , wherein$$

$$[ Ab ] = molar concentration of unoccupied binding sites on the antibody ;$$

$$[ Ag ] = molar concentration of unoccupied binding sites on the antigen ; \\ and$$

$$[ Ab - Ag ] = molar concentration of the antibody - antigen complex .$$

[0313] The antibody-antigen interaction can also be characterized based on the dissociation of the antigen from the antibody. The dissociation constant (K_{D}) is the ratio of the association rate to the dissociation rate and is inversely proportional to the affinity constant. Thus, K_{D}=1/K_{A}. Those skilled in the art will be familiar with these concepts and will know that traditional methods, such as ELISA assays, can be used to calculate these constants.

### Transmembrane Domain

[0314] The chimeric antigen receptors of the disclosure include a transmembrane domain. The transmembrane domain of the chimeric antigen receptors described herein spans the CAR-T cell's lipid bilayer cellular membrane and separates the extracellular binding domain and the intracellular signaling domain. In some embodiments, this domain is derived from other receptors having a transmembrane domain, while in other embodiments, this domain is synthetic. In some embodiments, the transmembrane domain may be derived from a non-human transmembrane domain and, in some embodiments, humanized. By “humanized” is meant having the sequence of the nucleic acid encoding the transmembrane domain optimized such that it is more reliably or efficiently expressed in a human subject. In some embodiments, the transmembrane domain is derived from another transmembrane protein expressed in a human immune effector cell. Examples of such proteins include, but are not limited to, subunits of the T cell receptor (TCR) complex, PD1, or any of the Cluster of Differentiation proteins, or other proteins, that are expressed in the immune effector cell and that have a transmembrane domain. In some embodiments, the transmembrane domain will be synthetic, and such sequences will comprise many hydrophobic residues.

[0315] Transmembrane domains for use in the disclosed CARs can include at least the transmembrane region(s) of) the alpha, beta or zeta chain of the T-cell receptor, CD28, CD3 epsilon, CD45, CD4, CD5, CD8, CD9, CD16, CD22, CD33, CD37, CD64, CD80, CD86, CD134, CD137, CD154. In some embodiments, the transmembrane domain is derived from CD4, CD8α, CD28 and CD3ζ.

[0316] The chimeric antigen receptor is designed, in some embodiments, to comprise a spacer between the transmembrane domain and the extracellular domain, the intracellular domain, or both. Such spacers can be 1, 2, 3, 4, 5, 6, 7, 8, 9, 10, 11, 12, 13, 14, 15, 16, 17, 18, 19, or 20 amino acids in length. In some embodiments, the spacer can be 20, 30, 40, 50, 60, 70, 80, 90, or 100 amino acids in length. In still other embodiments the spacer can be between 100 and 500 amino acids in length. The spacer can be any polypeptide that links one domain to another and are used to position such linked domains to enhance or optimize chimeric antigen receptor function.

### Intracellular Signaling Domain

[0317] The chimeric antigen receptors of the disclosure include an intracellular signaling domain. The intracellular signaling domain is the intracellular portion of a protein expressed in a T cell that transduces a T cell effector function signal (e.g., an activation signal) and directs the T cell to perform a specialized function. T cell activation can be induced by a number of factors, including binding of cognate antigen to the T cell receptor on the surface of T cells and binding of cognate ligand to costimulatory molecules on the surface of the T cell. A T cell co-stimulatory molecule is a cognate binding partner on a T cell that specifically binds with a co-stimulatory ligand, thereby mediating a co-stimulatory response by the T cell, such as, but not limited to, proliferation. Co-stimulatory molecules include but are not limited to an MHC class I molecule. Activation of a T cell leads to immune response, Such as T cell proliferation and differentiation (see, e.g., Smith-Garvin et al., Annu. Rev. Immunol., 27:591-619, 2009). Exemplary T cell signaling domains are known in the art. Non-limiting examples include the CD3ζ, CD8, CD28, CD27, CD154, GITR (TNFRSF18), CD134 (OX40), and CD137 (4-1BB) signaling domains.

[0318] The intracellular signaling domain of the chimeric antigen receptor contemplated herein comprises a primary signaling domain. In some embodiments, the chimeric antigen receptor comprises the primary signaling domain and a secondary, or co-stimulatory, signaling domain.

[0319] In some embodiments, the primary signaling domain comprises one or more immunoreceptor tyrosine-based activation motifs, or ITAMs. In some embodiments, the primary signaling domain comprises more than one ITAM. ITAMs incorporated into the chimeric antigen receptor may be derived from ITAMs from other cellular receptors. In some embodiments, the primary signaling domain comprising an ITAM may be derived from subunits of the TCR complex, such as CD3γ, CD3ε, CD3ζ, or CD3δ. In some embodiments, the primary signaling domain comprising an ITAM may be derived from FcRγ, FcRβ, CD5, CD22, CD79a, CD79b, or CD66d.

[0320] In some embodiments, the primary signaling domain is selected from the group consisting of CD8, CD28, CD134 (OX40), CD137 (4-1BB), and CD3ζ.

[0321] In some embodiments, the secondary, or co-stimulatory, signaling domain is derived from CD2, CD4, CDS, CD8α, CD28, CD83, CD134, CD137 (4-1BB), ICOS, or CD154, or a combination thereof. In some embodiments, the co-signaling domain is a cytoplasmic domain.

[0322] In some embodiments, the CAR comprises one or more signaling domains. In some embodiments, the CAR comprises a combination of signaling domains.

### Editing of Target Genes in Immune Cells

[0323] In some embodiments, provided herein is an immune cell with at least one modification in an endogenous gene or regulatory elements thereof. In some embodiments, the immune cell may comprise a further modification in at least one, two, three, four, five, six, seven, eight, nine, ten, eleven, twelve, thirteen, fourteen, fifteen, sixteen, seventeen, eighteen, nineteen, twenty or more endogenous genes or regulatory elements thereof. In some embodiments, the at least one modification is a single nucleobase modification. In some embodiments, the at least one modification is by base editing. The base editing may be positioned at any suitable position of the gene, or in a regulatory element of the gene. Thus, it may be appreciated that a single base editing at a start codon, for example, can completely abolish the expression of the gene. In some embodiments, the base editing may be performed at a site within an exon. In some embodiments, the base editing may be performed at a site on more than one exons. In some embodiments, the base editing may be performed at a start codon. In some embodiments, the base editing may be performed at a splice acceptor site. In some embodiments, the base editing may be performed at a splice donor site. In some embodiments, the base editing may be performed at any exon of the multiple exons in a gene. In some embodiments, base editing may introduce a premature STOP codon into an exon, resulting in either lack of a translated product or in a truncated that may be misfolded and thereby eliminated by degradation, or may produce an unstable mRNA that is readily degraded. In some embodiments, the immune cell is a T cell. In some embodiments, the immune cell is a CAR-T cell. In some embodiments, the immune cell is a NK cell.

[0324] In some embodiments, the immune cell is modified using prime editing. Methods for editing polynucleotide sequences using prime editing are well known in the art (see, e.g., Petrova I O, Smirnikhina S A. The Development, Optimization and Future of Prime Editing. Int J Mol Sci. 2023 Dec. 1; 24(23):17045. doi: 10.3390/ijms242317045, the disclosure of which is incorporated herein in its entirety by reference for all purposes). In some embodiments, the cell is modified using a CRISPR/Cas system. In some cases, expression of a gene in the cell may be disrupted through introduction of an insertion/deletion (indel) mutation to the gene using, e.g., a nuclease, such as a Cas12b or Cas9 protein, or through insertion of a heterologous polynucleotide sequence into the gene, such as through the use of a transposon or a CRISPR/Cas system.

[0325] In some embodiments, an edited gene may be an immune response regulation gene, an immunogenic gene, a checkpoint inhibitor gene, a gene involved in immune responses, a cell surface marker, e.g., a T cell surface marker, or any combination thereof. In some embodiments, the edited gene is associated with activated T cell proliferation, alpha-beta T cell activation, gamma-delta T cell activation, positive regulation of T cell proliferation, negative regulation of T-helper cell proliferation or differentiation, or their regulatory elements thereof, or combinations thereof. In some embodiments, the edited gene may be a checkpoint inhibitor gene.

[0326] In some embodiments, the gene is selected from those genes listed herein. Further non-limiting examples of genes that may be edited include those listed in any one of PCT Applications No. PCT/US2020/013964, PCT/US2020/052822, PCT/US2020/018178, PCT/US2021/52035, and PCT/US2022/075021, the disclosures of which are incorporated herein by reference in their entirety for all purposes.

[0327] In some embodiments, the editing of the endogenous gene reduces expression of the gene. In some embodiments, the editing of the endogenous gene reduces expression of the gene by at least 50% as compared to a control cell without the modification. In some embodiments, the editing of the endogenous gene reduces expression of the gene by at least 60% as compared to a control cell without the modification. In some embodiments, the editing of the endogenous gene reduces expression of the gene by at least 70% as compared to a control cell without the modification. In some embodiments, the editing of the endogenous gene reduces expression of the gene by at least 80% as compared to a control cell without the modification. In some embodiments, the editing of the endogenous gene reduces expression of the gene by at least 90% as compared to a control cell without the modification. In some embodiments, the editing of the endogenous gene reduces expression of the gene by at least 100% as compared to a control cell without the modification. In some embodiments, the editing of the endogenous gene eliminates gene expression.

[0328] In some embodiments, base editing may be performed on an intron. For example, base editing may be performed on an intron. In some embodiments, the base editing may be performed at a site within an intron. In some embodiments, the base editing may be performed at a site one or more introns. In some embodiments, the base editing may be performed at any exon of the multiple introns in a gene. In some embodiments, one or more base editing may be performed on an exon, an intron or any combination of exons and introns.

[0329] In some embodiments, the modification or base edit may be within a promoter site. In some embodiments, the base edit may be introduced within an alternative promoter site. In some embodiments, the base edit may be in a 5′ regulatory element, such as an enhancer. In some embodiment, base editing may be introduced to disrupt the binding site of a nucleic acid binding protein. Exemplary nucleic acid binding proteins may be a polymerase, nuclease, gyrase, topoisomerase, methylase or methyl transferase, transcription factors, enhancer, PABP, zinc finger proteins, among many others.

[0330] In some embodiments, base editing may be used for splice disruption to silence target protein expression. In some embodiments, base editing may generate a splice acceptor-splice donor (SA-SD) site. Targeted base editing generating a SA-SD, or at a SA-SD site can result in reduced expression of a gene. In some embodiments, base editors (e.g., ABE, CBE, CABE) are used to target dinucleotide motifs that constitute splice acceptor and splice donor sites, which are the first and last two nucleotides of each intron. In some embodiments, splice disruption is achieved with an adenosine base editor (ABE). In some embodiments, splice disruption is achieved with a cytidine base editor (CBE). In some embodiments, base editors (e.g., CBE, CABE) are used to edit exons by creating STOP codons.

[0331] In some embodiments, provided herein is an immune cell with at least one modification in one or more endogenous genes. In some embodiments, the immune cell may have at least one modification in one, two, three, four, five, six, seven, eight, nine, ten, eleven, twelve, thirteen, fourteen, fifteen, sixteen, seventeen, eighteen, nineteen, twenty or more endogenous genes. In some embodiments, the modification generates a premature stop codon in the endogenous genes. In some embodiments, the STOP codon silences target protein expression. In some embodiments, the modification is a single base modification. In some embodiments, the modification is generated by base editing. The premature stop codon may be generated in an exon, an intron, or an untranslated region. In some embodiments, base editing may be used to introduce more than one STOP codon, in one or more alternative reading frames. In some embodiments, the stop codon is generated by a adenosine base editor (ABE). In some embodiments, the stop codon is generated by a cytidine base editor (CBE). In some embodiments, the CBE generates any one of the following edits (shown in underlined font) to generate a STOP codon: CAG→TAG; CAA→TAA; CGA→TGA; TGG→TGA; TGG→TAG; or TGG→TAA.

[0332] In some embodiments, modification/base edits may be introduced at a 3′-UTR, for example, in a poly adenylation (poly-A) site. In some embodiments, base editing may be performed on a 5′-UTR region.

### Editing of Target Genes

[0333] To produce the gene edits described herein using base editing, cells are contacted with one or more guide RNAs and a nucleobase editor polypeptide comprising a nucleic acid programmable DNA binding protein (napDNAbp) and a cytidine deaminase or adenosine deaminase or comprising one or more deaminases with cytidine deaminase and/or adenosine deaminase activity (e.g., a “dual deaminase” which has cytidine and adenosine deaminase activity). In some embodiments, cells to be edited are contacted with at least one nucleic acid, where the at least one nucleic acid encodes one or more guide RNAs and a nucleobase editor polypeptide containing a nucleic acid programmable DNA binding protein (napDNAbp) and a deaminase. In some embodiments, the gRNA comprises nucleotide analogs. In some instances, the gRNA is added directly to a cell. These nucleotide analogs can inhibit degradation of the gRNA from cellular processes. Tables 1 and 2A-2C provide representative sequences to be used for gRNAs. In some embodiments, the gene edits described herein are introduced to a polynucleotide using prime editing. Methods for editing polynucleotide sequences using prime editing are well known in the art (see, e.g., Petrova I O, Smirnikhina S A. The Development, Optimization and Future of Prime Editing. Int J Mol Sci. 2023 Dec. 1; 24(23):17045. doi: 10.3390/ijms242317045, the disclosure of which is incorporated herein in its entirety by reference for all purposes). In some embodiments, the gene edits described herein are introduced to a polynucleotide using a CRISPR/Cas system. In some cases, expression of a gene may be disrupted through introduction of an insertion/deletion (indel) mutation to the gene using, e.g., a nuclease, such as a Cas12b or Cas9 protein, or through insertion of a heterologous polynucleotide sequence into the gene, such as through the use of a transposon or a CRISPR/Cas system.

[0334] In various instances, it is advantageous for a spacer sequence to include a 5′ and/or a 3′ “G” nucleotide. In some cases, for example, any spacer sequence or guide polynucleotide provided herein comprises or further comprises a 5′ “G”, where, in some embodiments, the 5′ “G” is or is not complementary to a target sequence. In some embodiments, the 5′ “G” is added to a spacer sequence that does not already contain a 5′ “G.” For example, it can be advantageous for a guide RNA to include a 5′ terminal “G” when the guide RNA is expressed under the control of a U6 promoter or the like because the U6 promoter prefers a “G” at the transcription start site (see Cong, L. et al. “Multiplex genome engineering using CRISPR/Cas systems. Science 339:819-823 (2013) doi: 10.1126/science.1231143). In some cases, a 5′ terminal “G” is added to a guide polynucleotide that is to be expressed under the control of a promoter but is optionally not added to the guide polynucleotide if or when the guide polynucleotide is not expressed under the control of a promoter.

[0335] In embodiments, a guide RNA of the disclosure contains a scaffold. A non-limiting example of a scaffold nucleotide sequence is the following: GUUUUAGAGCUAGAAAUAGCAAGUUAAAAUAAGGCUAGUCCGUUAUCAACUUGAAAAAGUGG CACCGAGUCGGUGCU*mU*mU*mU (SEQ ID NO: 1452), where the symbol “*mU” indicates a uracil nucleotide with a 2′-O-methyl modification and linked to the listed 5′ nucleotide by a 3′-phosphorothioate.

[0336] Exemplary guide RNA sequences are provided in Tables 1, and 2A-2C below.

TABLE 1
Exemplary guide polynucleotide sequences.

| Guide | Alternative | | SEQ ID |
|---|---|---|---|
| Name | Name | sgRNA Sequence¹ | NO |
| EF8 | LP | AUGUACCUGGUCCAAGGAACGUUUUAGAGCUAGAAAUAG | 427 |
| | sgRNA26 | CAAGUUAAAAUAAGGCUAGUCCGUUAUCAACUUGAAAAA | |
| | | GUGGCACCGAGUCGGUGCU*mU*mU*mU | |
| EF7 | LP | UAGGAUGGUAGCACACAACCGUUUUAGAGCUAGAAAUAG | 426 |
| | sgRNA19 | CAAGUUAAAAUAAGGCUAGUCCGUUAUCAACUUGAAAAA | |
| | | GUGGCACCGAGUCGGUGCU*mU*mU*mU | |
| EF9 | LP | GGUUCAUACCUUGAAACAGGGUUUUAGAGCUAGAAAUAG | 428 |
| | sgRNA27 | CAAGUUAAAAUAAGGCUAGUCCGUUAUCAACUUGAAAAA | |
| | | GUGGCACCGAGUCGGUGCU*mU*mU*mU | |
| EF10 | LP | AGGUCCUACCUUGUCAAUAAGUUUUAGAGCUAGAAAUAG | 429 |
| | sgRNA28 | CAAGUUAAAAUAAGGCUAGUCCGUUAUCAACUUGAAAAA | |
| | | GUGGCACCGAGUCGGUGCU*mU*mU*mU | |
| EF11 | Effi-sg17 | UUUAGGAACCUCCUUAUAGCGUUUUAGAGCUAGAAAUAG | 430 |
| | | CAAGUUAAAAUAAGGCUAGUCCGUUAUCAACUUGAAAAA | |
| | | GUGGCACCGAGUCGGUGCU*mU*mU*mU | |
| EF12 | Effi-sg18 | GCUUACUUCUUCCGGAUGAAGUUUUAGAGCUAGAAAUAG | 431 |
| | | CAAGUUAAAAUAAGGCUAGUCCGUUAUCAACUUGAAAAA | |
| | | GUGGCACCGAGUCGGUGCU*mU*mU*mU | |
| EF13 | LP | CCUGCAGGACGGAGAGGAGCGUUUUAGAGCUAGAAAUAG | 432 |
| | sgRNA35 | CAAGUUAAAAUAAGGCUAGUCCGUUAUCAACUUGAAAAA | |
| | | GUGGCACCGAGUCGGUGCU*mU*mU*mU | |
| EF14 | Effi-sg19 | GCGGGCAUCUGGGCGCCGGGGUUUUAGAGCUAGAAAUAG | 433 |
| | | CAAGUUAAAAUAAGGCUAGUCCGUUAUCAACUUGAAAAA | |
| | | GUGGCACCGAGUCGGUGCU*mU*mU*mU | |
| EF15 | Effi-sg20 | GGACUCACCCGCUUCUGCAGGUUUUAGAGCUAGAAAUAG | 434 |
| | | CAAGUUAAAAUAAGGCUAGUCCGUUAUCAACUUGAAAAA | |
| | | GUGGCACCGAGUCGGUGCU*mU*mU*mU | |
| EF16 | Effi-sg21 | CUCCACAGGCAAAGAACAGAGUUUUAGAGCUAGAAAUAG | 435 |
| | | CAAGUUAAAAUAAGGCUAGUCCGUUAUCAACUUGAAAAA | |
| | | GUGGCACCGAGUCGGUGCU*mU*mU*mU | |
| EF17 | Effi-sg22 | CUCCAGGACGGCCGGGGCUUGUUUUAGAGCUAGAAAUAG | 436 |
| | | CAAGUUAAAAUAAGGCUAGUCCGUUAUCAACUUGAAAAA | |
| | | GUGGCACCGAGUCGGUGCU*mU*mU*mU | |
| EF18 | Effi-sg23 | AUUUACCUUCUGGUGGCUCCGUUUUAGAGCUAGAAAUAG | 437 |
| | | CAAGUUAAAAUAAGGCUAGUCCGUUAUCAACUUGAAAAA | |
| | | GUGGCACCGAGUCGGUGCU*mU*mU*mU | |
| EF19 | LP | CUUACCUGGAUCCAUUCAUGGUUUUAGAGCUAGAAAUAG | 438 |
| | sgRNA38 | CAAGUUAAAAUAAGGCUAGUCCGUUAUCAACUUGAAAAA | |
| | | GUGGCACCGAGUCGGUGCU*mU*mU*mU | |
| EF20 | LP | CCUGCAGGAGGCUCUGUCGGGUUUUAGAGCUAGAAAUAG | 439 |
| | sgRNA39 | CAAGUUAAAAUAAGGCUAGUCCGUUAUCAACUUGAAAAA | |
| | | GUGGCACCGAGUCGGUGCU*mU*mU*mU | |
| EF21 | LP | UCACUUUAGGGAGUCUCCGGGUUUUAGAGCUAGAAAUAG | 440 |
| | sgRNA40 | CAAGUUAAAAUAAGGCUAGUCCGUUAUCAACUUGAAAAA | |
| | | GUGGCACCGAGUCGGUGCU*mU*mU*mU | |
| EF22 | LP | CCUCUGCAGACCCCACACUGGUUUUAGAGCUAGAAAUAG | 441 |
| | sgRNA41 | CAAGUUAAAAUAAGGCUAGUCCGUUAUCAACUUGAAAAA | |
| | | GUGGCACCGAGUCGGUGCU*mU*mU*mU | |
| EF23 | Effi-sg24 | CACAGGUCCUCCCCUUGGAGGUUUUAGAGCUAGAAAUAG | 442 |
| | | CAAGUUAAAAUAAGGCUAGUCCGUUAUCAACUUGAAAAA | |
| | | GUGGCACCGAGUCGGUGCU*mU*mU*mU | |
| EF24 | LP | CUUACCUCUUCAUUUCCAGGGUUUUAGAGCUAGAAAUAG | 443 |
| | sgRNA46 | CAAGUUAAAAUAAGGCUAGUCCGUUAUCAACUUGAAAAA | |
| | | GUGGCACCGAGUCGGUGCU*mU*mU*mU | |
| EF25 | LP | CUCACCUGUGAUGGGCACGUGUUUUAGAGCUAGAAAUAG | 444 |
| | sgRNA118 | CAAGUUAAAAUAAGGCUAGUCCGUUAUCAACUUGAAAAA | |
| | | GUGGCACCGAGUCGGUGCU*mU*mU*mU | |
| EF26 | LP | AACAUACUUGUCAUUGACGAGUUUUAGAGCUAGAAAUAG | 445 |
| | sgRNA119 | CAAGUUAAAAUAAGGCUAGUCCGUUAUCAACUUGAAAAA | |
| | | GUGGCACCGAGUCGGUGCU*mU*mU*mU | |
| EF27 | Effi-sg25 | UCCCAGACCAGCACAUCCUGGUUUUAGAGCUAGAAAUAG | 446 |
| | | CAAGUUAAAAUAAGGCUAGUCCGUUAUCAACUUGAAAAA | |
| | | GUGGCACCGAGUCGGUGCU*mU*mU*mU | |
| EF28 | Effi-sg26 | CCCUCCCAGCCAUGGGAACAGUUUUAGAGCUAGAAAUAG | 447 |
| | | CAAGUUAAAAUAAGGCUAGUCCGUUAUCAACUUGAAAAA | |
| | | GUGGCACCGAGUCGGUGCU*mU*mU*mU | |
| EF29 | Effi-sg16 | ACUCUAAAAAGUGAAAAUCAGUUUUAGAGCUAGAAAUAG | 448 |
| | | CAAGUUAAAAUAAGGCUAGUCCGUUAUCAACUUGAAAAA | |
| | | GUGGCACCGAGUCGGUGCU*mU*mU*mU | |

¹The symbol “*mU” incidates a uracil nucleotide with a 2′-O-methyl modification and linked to the listed 5′ nucleotide by a 3′-phosphorothioate. In some embodiments, the first three 5′-terminal nucleotides of a guide polynucleotide contain a 2′-O-methyl modification and/or the first four 5′ terminal nucleotides of a guide polynucleotide are each linked to each other by a 3′-phosphorothioate.

TABLE 2A
Exemplary spacer sequences. An exemplary adenosine base editor (ABE) is
ABE8.20m.

| | | | | Protospacer | Compatible |
|---|---|---|---|---|---|
| Guide | Alternative | | SEQ ID | Adjacent | base |
| Name | Name | Spacer | NO | Motif (PAM) | editor(s) |
| EF8 | LP sgRNA26 | AUGUACCUGGUCCAAGGAAC | 456 | | ABE/CBE |
| EF1 | LP sgRNA87 | CUCACCAGAUUCCCGAAGGU | 449 | AGG | ABE |
| EF2 | LP sgRNA88 | UCUUUAGUCUUCUCCUUGCA | 450 | TGG | ABE |
| EF3 | LP sgRNA13 | CCUCCUUACCAGCAAGAGGC | 451 | | ABE/CBE |
| EF4 | LP sgRNA14 | AUAUUACCUUUCGAUGCCGU | 452 | | ABE/CBE |
| EF5 | LP sgRNA15 | GCCCGUCAUGGAGAUGGAAA | 453 | | ABE |
| EF6 | LP sgRNA16 | GGAAACAUACCCUGUAGCAG | 454 | | ABE |
| EF7 | LP sgRNA19 | UAGGAUGGUAGCACACAACC | 455 | | ABE |
| EF9 | LP sgRNA27 | GGUUCAUACCUUGAAACAGG | 457 | | ABE |
| EF10 | LP sgRNA28 | AGGUCCUACCUUGUCAAUAA | 458 | | ABE |
| EF11 | Effi-sg17 | UUUAGGAACCUCCUUAUAGC | 459 | CGG | ABE |
| EF12 | Effi-sg18 | GCUUACUUCUUCCGGAUGAA | 460 | AGG | ABE |
| EF13 | LP sgRNA35 | CCUGCAGGACGGAGAGGAGC | 461 | | ABE |
| EF14 | Effi-sg19 | GCGGGCAUCUGGGCGCCGGG | 462 | AGG | ABE |
| EF15 | Effi-sg20 | GGACUCACCCGCUUCUGCAG | 463 | GGG | ABE |
| EF16 | Effi-sg21 | CUCCACAGGCAAAGAACAGA | 464 | AGG | ABE |
| EF17 | Effi-sg22 | CUCCAGGACGGCCGGGGCUU | 465 | TGG | ABE |
| EF18 | Effi-sg23 | AUUUACCUUCUGGUGGCUCC | 466 | AGG | ABE |
| EF19 | LP sgRNA38 | CUUACCUGGAUCCAUUCAUG | 467 | | ABE/CBE |
| EF20 | LP sgRNA39 | CCUGCAGGAGGCUCUGUCGG | 468 | | ABE |
| EF21 | LP sgRNA40 | UCACUUUAGGGAGUCUCCGG | 469 | | ABE |
| EF22 | LP sgRNA41 | CCUCUGCAGACCCCACACUG | 470 | | ABE |
| EF23 | Effi-sg24 | CACAGGUCCUCCCCUUGGAG | 471 | GGG | ABE |
| EF24 | LP sgRNA46 | CUUACCUCUUCAUUUCCAGG | 472 | | ABE/CBE |
| EF25 | LP | CUCACCUGUGAUGGGCACGU | 473 | | ABE |
| | sgRNA118 | | | | |
| EF26 | LP | AACAUACUUGUCAUUGACGA | 474 | | ABE |
| | sgRNA119 | | | | |
| EF27 | Effi-sg25 | UCCCAGACCAGCACAUCCUG | 475 | CGG | ABE |
| EF28 | Effi-sg26 | CCCUCCCAGCCAUGGGAACA | 476 | AGG | ABE |
| EF29 | Effi-sg16 | ACUCUAAAAAGUGAAAAUCA | 477 | AGG | CBE |
| EF46 | | CUUACCGAUGUUCCCUUCGA | 478 | TGG | ABE |
| EF47 | | CUUACUUCAGUGUCCUAUGC | 479 | AGG | ABE |
| EF48 | | CCCAGGCCUACCCUCUGAAG | 480 | AGG | ABE |
| EF49 | | CACCCUAGACUCCACCAAAA | 481 | AGG | ABE |
| EF50 | | AUUAUAGGCCAUUGGGUACG | 482 | AGG | ABE |
| EF51 | | UCCUAGACUCUGAAGGACGA | 483 | CGG | ABE |
| EF52 | | CCAAGGUCCAAUCACAUGUG | 484 | TGG | ABE |
| EF53 | | GGCUAGGAGUCAGCGACAUA | 485 | TGG | ABE |
| EF54 | | ACUUACCUCGCGGACAUUCC | 486 | TGG | ABE |
| EF55 | | UCCCCCAGCCAACCUUUGUA | 487 | CGG | ABE |
| EF56 | | UGCUUACCCCACCCCAGUUG | 488 | AGG | ABE |
| EF57 | | AAUCACCUCUGAACAAUCCC | 489 | TGG | ABE |
| EF58 | | GAGGCUUACCUCUUCACUGU | 490 | TGG | ABE |
| EF59 | | UUUGGACAGAUCUAUUCCAG | 491 | AGG | ABE |
| EF60 | | ACCUCACCUUCUGUUUGUCG | 492 | AGG | ABE |
| EF61 | | CCCACAGAACACAGCCCACU | 493 | TGG | ABE |
| EF62 | | UGCCCACAGGUGACAGACUU | 494 | CGG | ABE |
| EF63 | | AGCCCUCACCUCUCACUAGU | 495 | GGG | ABE |
| EF64 | | CCCAGCCGUACUAUGCCACG | 496 | AGG | ABE |
| EF65 | | AUCUCAGAGUUUGCAGAAGC | 497 | AGG | ABE |
| EF66 | | ACUGCUGACCUUGAUGUAGU | 498 | TGG | ABE |
| EF67 | | UGCGUCCAGAACCAGCUGCU | 499 | AGG | ABE |
| EF68 | | CUCACCUGUCAAGAGCGGCG | 500 | TGG | ABE |
| EF69 | | UCUUUAGUCCGAGGAUCAGA | 501 | AGG | ABE |
| EF70 | | GCAAUUACCUUGUAUGGUUG | 502 | GGG | ABE |
| EF71 | | UGUUAUAGCUACUGCUGUGU | 503 | TGG | ABE |
| EF72 | | UUUACUUACCAAUUUGGAAU | 504 | TGG | ABE |
| EF73 | | CAGCAUGAAGGCGCUGAGCC | 505 | CGG | ABE |
| EF74 | | GGCUUACCUGGAUGGGAAGG | 506 | TGG | ABE |
| EF75 | | UCAGUUUACCAUUCGGAAGC | 507 | CGG | ABE |
| EF76 | | ACUUACCAGAAUGGGUCCUG | 508 | AGG | ABE |
| EF77 | | UGCUUACCCACAAACUUUUG | 509 | TGG | ABE |
| EF85 | | GCACCAUGGCCUCGGCUCGG | 517 | CGG | ABE |
| EF86 | | CUCACUGGGUGUCUGGUCUG | 518 | CGG | ABE |
| EF87 | | CUUACCUCUUGGGACAGGAA | 519 | AGG | ABE |
| EF88 | | UGCAGGCAGAGAUUGUCAAG | 520 | AGG | ABE |
| EF89 | | UUUAUAGCACCAGCAACAAG | 521 | TGG | ABE |
| EF90 | | CCCAAUACCUUUAAUGAUCC | 522 | AGG | ABE |
| EF91 | | CCUCACCCUCAUAGCAGUCG | 523 | CGG | ABE |
| EF92 | | UCCAGGUCCAGCUGUAUGUA | 524 | TGG | ABE |
| EF93 | | CUUACUCAAAGUCCCCAUCC | 525 | CGG | ABE |
| EF94 | TSBTx1599/ | ACUCACCCAGCAUCCCCAGC | 526 | AGG | ABE |
| | JMG222 | | | | |
| EF95 | | GCUUACAGAUCUUGCCCCGC | 527 | AGG | ABE |
| EF96 | | AUUUACCUGAACCUCUGAAU | 528 | TGG | ABE |
| EF97 | | CUUAGCAUCAAGGCAUGCCA | 529 | TGG | ABE |
| EF98 | | CUUACUGUACAACAAGCUGC | 530 | TGG | ABE |
| EF99 | | CCCUUACCAGGCUUGAUGAG | 531 | AGG | ABE |
| EF100 | | CUCAGACAAGGACACGUUGA | 532 | AGG | ABE |
| EF101 | | CAACAGGAAGGCUGACGAGG | 533 | TGG | ABE |
| EF102 | | CCCAGUGAAGACAGCAUCAU | 534 | CGG | ABE |
| EF103 | | CCCAGGACUUCCUGCUGCUG | 535 | CGG | ABE |
| EF104 | | UGUGUUACCUUGAUGACCGG | 536 | CGG | ABE |
| EF105 | | GUUCAUAGCUGGGCUCCUGG | 537 | AGG | ABE |
| EF106 | | CCUACCCACCUCCUUUCUCA | 538 | GGG | ABE |
| EF107 | | ACUCACGUGAGCACCGGGAU | 539 | GGG | ABE |
| EF108 | | GACUCACGUGAGCACCGGGA | 540 | TGG | ABE |
| EF109 | | GGACUCACUGAGACAAAGUA | 541 | GGG | ABE |
| EF110 | | GACUCACUGAGACAAAGUAG | 542 | GGG | ABE |
| EF111 | | CUCUUCCAGCCAGCUGAGGU | 543 | GGG | ABE |
| EF112 | | GAACUCACUCUUGUCAGUCU | 544 | TGG | ABE |
| EF113 | | UCCAGCGCUAGUCCUGCUGA | 545 | TGG | ABE |
| EF114 | | GAGGCAUGGCUGAAAUCUUC | 546 | CGG | ABE |
| EF115 | | GACUCUACCUGUUUGCCAGG | 547 | GGG | ABE |
| EF116 | | ACUUACCAGGUGCAGGGUGU | 548 | CGG | ABE |
| EF117 | | GCUGUGUACCUGAGGGGUCC | 549 | GGG | ABE |
| EF118 | | UUUGUAGCCAUCCAGUCCAA | 550 | TGG | ABE |
| EF119 | | UUCCUACAGAUUCCUCCUUA | 551 | TGG | ABE |
| EF120 | | AUACUCACAGGCAAGCUGGA | 552 | GGG | ABE |

TABLE 2B
Description of sequences targeted by spacers of Table 2A.

| | | | | Molecular |
|---|---|---|---|---|
| | | | | Weight of |
| | | | | Polypeptide |
| | | | | Encoded by |
| | | | Target | Target |
| Guide | | Description of | Alteration | Polypeptide |
| Name | Alternative Name | Target | Location¹ | (kDa) |
| EF1 | LP sgRNA87 | CISH | CISH Ex. 3 SA | 29 |
| | | | A4/A5 | |
| EF2 | LP sgRNA88 | CBLB | CBLB Ex. 9 SD | 109 |
| | | | A6 | |
| EF3 | LP sgRNA13 | PTPN1 (PTP1B) | | 50 |
| EF4 | LP sgRNA14 | PTPN1 (PTP1B) | A6 | |
| EF5 | LP sgRNA15 | PTPN1 (PTP1B) | sgRNA3 (ABE) | |
| EF6 | LP sgRNA16 | PTPN1 (PTP1B) | sgRNA8 (ABE) | |
| EF7 | LP sgRNA19 | SOCS1 | Start Co. A5 | 23 |
| EF8 | LP sgRNA26 | R3CH1 (Roquin- | Ex. 3 SD A5 | 130 |
| | | 1) | | |
| EF9 | LP sgRNA27 | R3CH1 (Roquin- | Ex. 4 SD A8 | |
| | | 1) | | |
| EF10 | LP sgRNA28 | R3CH1 (Roquin- | Ex. 5 SD A8 | |
| | | 1) | | |
| EF11 | Effi-sg17 | R3CH1 (Roquin- | Ex. 12 SD A4 | |
| | | 1) | | |
| EF12 | Effi-sg18 | R3CH1 (Roquin- | Ex. 12 SA A5 | |
| | | 1) | | |
| EF13 | LP sgRNA35 | DNMT3A | Ex. 2 SD A6 | 102 |
| EF14 | Effi-sg19 | DNMT3A | Start Co. A7 | |
| EF15 | Effi-sg20 | DNMT3A | Ex. 3 SA A7 | |
| EF16 | Effi-sg21 | DNMT3A | Ex. 4 SD A7 | |
| EF17 | Effi-sg22 | DNMT3A | Ex. 7 SD A5 | |
| EF18 | Effi-sg23 | DNMT3A | Ex. 9 SA A6 | |
| EF19 | LP sgRNA38 | FLI-1 | Ex. 2 SD A4 | 51 |
| EF20 | LP sgRNA39 | FLI-1 | Ex. 2 SA A6 | |
| EF21 | LP sgRNA40 | FLI-1 | Ex. 3 SD A8 | |
| EF22 | LP sgRNA41 | FLI-1 | Ex. 4 SD A8 | |
| EF23 | Effi-sg24 | FLI-1 | Ex. 6 SD A4 | |
| EF24 | LP sgRNA46 | DDIT3 (Chop) | Ex. 1 SA A4 | 20 |
| EF25 | LP sgRNA118 | ZC3H12A | Ex. 2 SA A4, C5 | 66 |
| | | (Regnase1) | | |
| EF26 | LP sgRNA119 | ZC3H12A | Ex. 3 SA A6, C7 | |
| | | (Regnase1) | | |
| EF27 | Effi-sg25 | ZC3H12A | Ex. 3 SD A5 | |
| | | (Regnase1) | | |
| EF28 | Effi-sg26 | ZC3H12A | Ex. 2 SD A8 | |
| | | (Regnase1) | | |
| EF29 | Effi-sg16 | PTPN2 | Ex. 6 SD C4 | |
| EF46 | | DCK | Ex. 1 SA A4 | 31 |
| EF47 | | DCK | Ex. 5 SA A4 | |
| EF48 | | DGKa | Ex. 2 SD A4 | 83 |
| EF49 | | DGKa | Ex. 3 SD A7 | |
| EF50 | | DGKa | Ex. 4 SD A6 | |
| EF51 | | DGKa | Ex. 7 SD A5 | |
| EF52 | | DGKa | Ex. 9 SD A4 | |
| EF53 | | DGKz | Ex. 3 SD A5 | 124 |
| EF54 | | DGKz | Ex. 5 SA A5 | |
| EF55 | | DGKz | Ex. 6 SD A7 | |
| EF56 | | DGKz | Ex. 13 SA A6 | |
| EF57 | | PRDM1 | Ex. 2 SA A5 | 95-100 |
| EF58 | | PRDM1 | Ex. 3 SA A8 | |
| EF59 | | PRDM1 | Ex. 4 SD A8 | |
| EF60 | | PRKACA | Ex. 3 SA A6 | 42 |
| EF61 | | PRKACA | Ex. 3 SD A6 | |
| EF62 | | PRKACA | Ex. 7 SD A8 | |
| EF63 | | PTPN6 | Ex. 3 SA A8 | 68 |
| EF64 | | PTPN6 | Ex. 6 SD A4 | |
| EF65 | | PTPN6 | Ex. 7 SD A6 | |
| EF66 | | PTPN6 | Ex. 8 SA A8 | |
| EF67 | | PTPN6 | Ex. 8 SD A8 | |
| EF68 | | EIF2A | Ex. 1 SA A4 | ~70 |
| EF69 | | EIF2A | Ex. 2 SD A6 | |
| EF70 | | EIF2A | Ex. 7 SA A7 | |
| EF71 | | EIF2A | Ex. 9 SD A7 | |
| EF72 | | EIF2A | Ex. 10 SA A8 | |
| EF73 | | ID3 | Start Co. A5 | 13 |
| EF74 | | ID3 | Ex. 1 SA A6 | |
| EF75 | | IKZF2 | Ex. 3 SA A8 | 58, 63-70, 85 |
| EF76 | | IKZF2 | Ex. 5 SA A5 | |
| EF77 | | IKZF2 | Ex. 7 SA A6 | |
| EF85 | | SOX4 | Start Co. A6 | |
| EF86 | | TLE4 | Ex. 1 SA A4 | 84 |
| EF87 | | TLE4 | Ex. 5 SA A4 | |
| EF88 | | TLE4 | Ex. 5 SD A4 | |
| EF89 | | TLE4 | Ex. 6 SD A6 | |
| EF90 | | TLE4 | Ex. 7 SA A7 | |
| EF91 | | TMEM184B | Ex. 3 SA A5 | 12 |
| EF92 | | TMEM184B | Ex. 5 SD A4 | |
| EF93 | | TMEM184B | Ex. 6 SA A4 | |
| EF94 | TSBTx1599/JMG222 | CD5 | Ex. 1 SA A5 | |
| EF95 | | RASA2 | Ex. 1 SA A5 | |
| EF96 | | RASA2 | Ex. 4 SA A5 | |
| EF97 | | RASA2 | Ex. 7 SD A4 | |
| EF98 | | RASA2 | Ex. 6 SA A4 | |
| EF99 | | RASA2 | Ex. 9 SA A6 | |
| EF100 | | DHX37 | | 130 |
| EF101 | | DHX37 | | |
| EF102 | | DHX37 | | |
| EF103 | | DHX37 | | |
| EF104 | | DHX37 | | |
| EF105 | | IL6 | Start Co. A5 | |
| EF106 | | IL6 | Ex. 1 SA A8 | |
| EF107 | | TMEM222 | | |
| EF108 | | TMEM222 | | |
| EF109 | | TMEM222 | | |
| EF110 | | TMEM222 | | |
| EF111 | | PFN1 | Ex. 2 SA A8 | 15 |
| EF112 | | PFN1 | Ex. 2 SD A7 | |
| EF113 | | PFN1 | Ex. 3 SA A4 | |
| EF114 | | BATF | Start co. A6 | 15 |
| EF115 | | BATF | Ex. 1 SD A7 | |
| EF116 | | BATF | Ex. 2 SD A5 | |
| EF117 | | ARID1A | Ex. 1 SD A8 | 270 |
| EF118 | | ARID1A | Ex. 2 SA A6 | |
| EF119 | | ARID1A | Ex. 3 SA A8 | |
| EF120 | | ARID1A | Ex. 4 SD A7 | |

¹The term “SA” indicates a splice acceptor site, the term “SD” indicates a splice donor site, the term “Ex.” Indicates an exon, the term “Start Co.” indicates a start codon, and the term “NX,” where N is any nucleotide and X is an integer, indicates the location within the spacer (relative to the 5′-end of the spacer) corresponding to the target nucleobase.

TABLE 2C
Further exemplary spacer sequences.

| Polypeptide | | | |
|---|---|---|---|
| endoded by | | | Compatible |
| target | | SEQ | base |
| polynucleotide | Spacer | ID NO | editor(s) |
| B2M | AAGUCAACUUCAAUGUCGGA | 681 | CBE, ABE |
| B2M | ACAAAGUCACAUGGUUCACA | 682 | CBE, ABE |
| B2M | ACAGCCCAAGAUAGUUAAGU | 683 | CBE |
| B2M | ACCCAGACACAUAGCAAUUC | 684 | CBE, ABE |
| B2M | ACUCACGCUGGAUAGCCUCC | 685 | CBE, ABE |
| B2M | ACUUGUCUUUCAGCAAGGAC | 686 | CBE, ABE |
| B2M | AGUCACAUGGUUCACACGGC | 687 | CBE, ABE |
| B2M | AUACUCAUCUUUUUCAGUGG | 688 | CBE, ABE |
| B2M | CACAGCCCAAGAUAGUUAAG | 689 | CBE |
| B2M | CAGCCCAAGAUAGUUAAGUG | 690 | CBE |
| B2M | CAGUAAGUCAACUUCAAUGU | 691 | CBE, ABE |
| B2M | CAUACUCAUCUUUUUCAGUG | 692 | CBE, ABE |
| B2M | CGCGAGCACAGCUAAGGCCA | 693 | CBE, ABE |
| B2M | CGUGAGUAAACCUGAAUCUU | 694 | CBE |
| B2M | CUCACGCUGGAUAGCCUCC | 695 | CBE, ABE |
| B2M | CUCAGGUACUCCAAAGAUUC | 696 | |
| B2M | CUUACCCCACUUAACUAUCU | 697 | CBE, ABE |
| B2M | GAAGUUGACUUACUGAAGAA | 698 | CBE, ABE |
| B2M | GAGUAGCGCGAGCACAGCUA | 699 | CBE, ABE |
| B2M | GCAUACUCAUCUUUUUCAGU | 700 | CBE, ABE |
| B2M | GCUACUCUCUCUUUCUGGCC | 701 | CBE, ABE |
| B2M | GGCAUACUCAUCUUUUUCAG | 702 | CBE, ABE |
| B2M | UACCCCACUUAACUAUCU | 703 | |
| B2M | UCACGCUGGAUAGCCUCC | 704 | CBE, ABE |
| B2M | UCGAUCUAUGAAAAAGACAG | 705 | ABE |
| B2M | UGGAGAGAGAAUUGAAAAAG | 706 | CBE, ABE |
| B2M | UGGAGUACCUGAGGAAUAUC | 707 | |
| B2M | UGGGCUGUGACAAAGUCACA | 708 | CBE, ABE |
| B2M | UUACCCCACUUAACUAUCUU | 709 | CBE, ABE |
| B2M | UUCAGACUUGUCUUUCAGCA | 710 | CBE, ABE |
| B2M | UUUGACUUUCCAUUCUCUGC | 711 | CBE, ABE |
| CD3e | ACACACUGUGGGGGGUGGGG | 712 | |
| CD3e | ACACAGACACGUGAGUUUAU | 713 | |
| CD3e | ACACUGUGGGGGGUGGGGUG | 714 | |
| CD3e | ACUCACCUGAUAAGAGGCAG | 715 | |
| CD3e | CACACUGUGGGGGGUGGGGU | 716 | |
| CD3e | CCGACUGCAUCUUUGUUUCA | 717 | |
| CD3e | CGUUACCUCAUAGUCUGGGU | 718 | |
| CD3e | CUGGAUUACCUCUUGCCCUC | 719 | |
| (TSBTx4073) | | | |
| CD3e | GUUACCUCAUAGUCUGGGUU | 720 | |
| CD3e | UACCACCUGAAAAUGAAAAA | 721 | |
| CD3e | UAUAUGCUGGGGAGAAAGAA | 722 | |
| CD3e | UUAUAUGCUGGGGAGAAAGA | 723 | |
| CD3e | UUGUCCUGCGGAGGAAGGAG | 724 | |
| CD3e | UUUGUCCUGCGGAGGAAGGA | 725 | |
| CD3e | UUUUGUCCUGCGGAGGAAGG | 726 | |
| CD3g | ACAUACUUCUGUAAUACACU | 727 | |
| CD3g | ACCUUCAAGGAAACCAGUUG | 728 | |
| CD3g | CAUGGAACAGGGGAAGGGCC | 729 | |
| CD3g | CUCUUCCAUUGGGUACAUAA | 730 | |
| CD3g | CUUCAAGGUAAGGGCCUACU | 731 | |
| CD3g | GACCAGUACAGCCACCUUCA | 732 | |
| CD3g | UCUCCUACCUUUGAUUGACU | 733 | |
| CD3g | UGACCAGCUCUACCAGGUAA | 734 | |
| CD3g | UGACUAUCAAGAAGAUGGUU | 735 | |
| CD3g | UGGCCCAGUCAAUCAAAGGU | 736 | |
| CD3g | UUCUCCUACCUUUGAUUGAC | 737 | |
| CD3g | UUUAAACCAUGUGAUAUUUU | 738 | |
| CD7 | CccUACCUGUCACCAGGACC | 739 | |
| CIITA | AAAGGCACUGCAAGAGACAA | 740 | |
| CIITA | ACACUCACUCCAUCACCCGG | 741 | |
| CIITA | ACAUCAAAGUACCCUACAGG | 742 | |
| CIITA | ACCGGCUCUGCAAAGGCCAG | 743 | |
| CIITA | ACCUCCCGAGCAAACAUGAC | 744 | |
| CIITA | ACUGGACCAGUAUGUCUUCC | 745 | |
| CIITA | AGACUCAGAGGUGAGAGGAG | 746 | |
| CIITA | AGCCAAGUACCCCCUCCCAG | 747 | |
| CIITA | AGCCCCAAGGUAAAAAGGCC | 748 | |
| CIITA | AGCCUAGGAGGCAAAGAGCA | 749 | |
| CIITA | AGGCCAUUUUGGAAGCUUGU | 750 | |
| CIITA | AGGCUGCAGGUGGAAUCAGA | 751 | |
| CIITA | CACAUCCUGCAAGGGGGGAU | 752 | |
| CIITA | CACUCACCUUAGCCUGAGCA | 753 | |
| CIITA | CACUCACUCCAUCACCCGGA | 754 | |
| CIITA | CACUCACUUGAGGGUUUCCA | 755 | |
| CIITA | CAGACAUCAAAGUACCCUAC | 756 | |
| CIITA | CAGACUGCGGGGACACAGUG | 757 | |
| CIITA | CAGCUCACAGUGUGCCACCA | 758 | |
| CIITA | CCACAUCCUGCAAGGGGGGA | 759 | |
| CIITA | CCACUCACCUUAGCCUGAGC | 760 | |
| CIITA | CCCACCCAAUGCCCGGCAGC | 761 | |
| CIITA | CCCCCAGGCUUUCCCCAAAC | 762 | |
| CIITA | CCUCCUGCAAUGCUUCCUGG | 763 | |
| CIITA | CCUGGUCCAGAGCCUGAGCA | 764 | |
| CIITA | CCUUACCUGUCAUGUUUGCU | 765 | |
| CIITA | CGCCCAGGUCCUCACGUCUG | 766 | |
| CIITA | CGUCCAGUACAACAAGUUCA | 767 | |
| CIITA | CUCUGGCAAAUCUCUGAGGC | 768 | |
| CIITA | CUGCCAAAUUCCAGCCUCCU | 769 | |
| CIITA | CUGGUCAGGGCAAGAGCUAU | 770 | |
| CIITA | CUUAGUCCAACACCCACCGC | 771 | |
| CIITA | CUUCCCCCAGCUGAAGUCCU | 772 | |
| CIITA | GAACGGCAGCUGGCCCAAGG | 773 | |
| CIITA | GACACGAGUGAUUGCUGUGC | 774 | |
| CIITA | GACCAGAUUCCCAGUAUGUU | 775 | |
| CIITA | GAGCCAGCCACAGGGCCCCC | 776 | |
| CIITA | GAGCCCCAAGGUAAAAAGGC | 777 | |
| CIITA | GCGUCCACAUCCUGCAAGGG | 778 | |
| CIITA | GGAAGCAGAAGGUGCUUGCG | 779 | |
| CIITA | GGCCCAAGGAGGCCUGGCUG | 780 | |
| CIITA | GGCGGGCCAAGACUUCUCCC | 781 | |
| CIITA | GGCGUCCACAUCCUGCAAGG | 782 | |
| CIITA | GGCUGCAGCCGGGGACACUG | 783 | |
| CIITA | GGGCCCACAGCCACUCGUGG | 784 | |
| CIITA | GGGCGUCCACAUCCUGCAAG | 785 | |
| CIITA | GUACAAGCUGUCGGAAACAG | 786 | |
| CIITA | UAACAUACUGGGAAUCUGGU | 787 | |
| CIITA | UAUGACCAGAUGGACCUGGC | 788 | |
| CIITA | UCACUCCAGAUGCUGCAGGG | 789 | |
| CIITA | UGCUCUGGAGAUGGAGAAGC | 790 | |
| CIITA | UGGGCGUCCACAUCCUGCAA | 791 | |
| CIITA | UGGUGCAGGCCAGGCUGGAG | 792 | |
| CIITA | UGUCUUCCAGGACUCCCAGC | 793 | |
| CIITA | UUCAACCAGGAGCCAGCCUC | 794 | |
| CIITA | UUCCAGAAGAAGCUGCUCCG | 795 | |
| CIITA | UUUUACCUUGGGGCUCUGAC | 796 | |
| PD1 | ACGACUGGCCAGGGCGCCUG | 797 | |
| PD1 | CACCUACCUAAGAACCAUCC | 798 | |
| PD1 | GGACCCAGACUAGCAGCACC | 799 | |
| PD1 | GGAGUCUGAGAGAUGGAGAG | 800 | |
| PD1 | GGGGUUCCAGGGCCUGUCUG | 801 | |
| PD1 | CCUCCUUCUUUGAGGAGAAA | 802 | |
| PD1 | CCAGUGGCGAGAGAAGACCC | 803 | |
| PD1 | UGCCCAGCCACUGAGGCCUG | 804 | |
| PD1 | CGACUGGCCAGGGCGCCUGU | 805 | |
| PD1 | ACCGCCCAGACGACUGGCCA | 806 | |
| PD1 | CACCGCCCAGACGACUGGCC | 807 | |
| PD1 | UUCUCUCUGGAAGGGCACAA | 808 | |
| PD1 | CUACAACUGGGCUGGCGGCC | 809 | |
| PD1 | GACGUUACCUCGUGCGGCCC | 810 | |
| PD1 | CAGCAACCAGACGGACAAGC | 811 | |
| PD1 | CCUGCAGAGAAACACACUUG | 812 | |
| PD1 | CAGUUCCAAACCCUGGUGGU | 813 | |
| PD1 | GUGUCACACAACUGCCCAAC | 814 | |
| PD1 | AGCCGGCCAGUUCCAAACCC | 815 | |
| PD1 | CGGCCAGUUCCAAACCCUGG | 816 | |
| PD1 | UCCCUGCAGAGAAACACACU | 817 | |
| PD1 | GAGACUCACCAGGGGCUGGC | 818 | |
| TRAC | CCAGCCAAGUACGUAAGUAG | 819 | |
| TRAC | CUGGAUAUCUGUGGGACAAG | 820 | |
| TRAC | CUUACCUGGGCUGGGGAAGA | 821 | |
| TRAC | GCUACAAACAAGCUCAUCUU | 822 | |
| TRAC | UUCAAAACCUGUCAGUGAUU | 823 | |
| TRAC | UUCGUAUCUGUAAAACCAAG | 824 | |
| TRAC | UUUCAAAACCUGUCAGUGAU | 825 | |

### Nucleobase Editors

[0337] Useful in the methods and compositions described herein are nucleobase editors that edit, modify or alter a target nucleotide sequence of a polynucleotide. Nucleobase editors described herein typically include a polynucleotide programmable nucleotide binding domain and a nucleobase editing domain (e.g., adenosine deaminase, cytidine deaminase, or a dual deaminase). A polynucleotide programmable nucleotide binding domain, when in conjunction with a bound guide polynucleotide (e.g., gRNA), can specifically bind to a target polynucleotide sequence and thereby localize the base editor to the target nucleic acid sequence desired to be edited.

### Polynucleotide Programmable Nucleotide Binding Domain

[0338] Polynucleotide programmable nucleotide binding domains bind polynucleotides (e.g., RNA, DNA). A polynucleotide programmable nucleotide binding domain of a base editor can itself comprise one or more domains (e.g., one or more nuclease domains). In some embodiments, the nuclease domain of a polynucleotide programmable nucleotide binding domain comprises an endonuclease or an exonuclease.

[0339] Disclosed herein are base editors comprising a polynucleotide programmable nucleotide binding domain comprising all or a portion (e.g., a functional portion) of a CRISPR protein (i.e., a base editor comprising as a domain all or a portion (e.g., a functional portion) of a CRISPR protein (e.g., a Cas protein), also referred to as a “CRISPR protein-derived domain” of the base editor). A CRISPR protein-derived domain incorporated into a base editor can be modified compared to a wild-type or natural version of the CRISPR protein. A CRISPR protein-derived domain may comprise one or more mutations, insertions, deletions, rearrangements and/or recombinations relative to a wild-type or natural version of the CRISPR protein.

[0340] Cas proteins that can be used herein include class 1 and class 2. Non-limiting examples of Cas proteins include Cas1, Cas1B, Cas2, Cas3, Cas4, Cas5, Cas5d, Cas5t, Cas5h, Cas5a, Cas6, Cas7, Cas8, Cas9 (also known as Csn1 or Csx12), Cas10, Csy1, Csy2, Csy3, Csy4, Cse1, Cse2, Cse3, Cse4, Cse5e, Csc1, Csc2, Csa5, Csn1, Csn2, Csm1, Csm2, Csm3, Csm4, Csm5, Csm6, Cmr1, Cmr3, Cmr4, Cmr5, Cmr6, Csb1, Csb2, Csb3, Csx17, Csx14, Csx10, Csx16, CsaX, Csx3, Csx1, Csx1S, Csf1, Csf2, CsO, Csf4, Csd1, Csd2, Cst1, Cst2, Csh1, Csh2, Csa1, Csa2, Csa3, Csa4, Csa5, Cas12a/Cpf1, Cas12b/C2cl (e.g., SEQ ID NO: 232), Cas12c/C2c3, Cas12d/CasY, Cas12e/CasX, Cas12g, Cas12h, Cas12i, and Cas12j/CasΦ, CARF, DinG, homologues thereof, or modified versions thereof. A CRISPR enzyme can direct cleavage of one or both strands at a target sequence, such as within a target sequence and/or within a complement of a target sequence. For example, a CRISPR enzyme can direct cleavage of one or both strands within about 1, 2, 3, 4, 5, 6, 7, 8, 9, 10, 15, 20, 25, 50, 100, 200, 500, or more base pairs from the first or last nucleotide of a target sequence.

[0341] A vector that encodes a CRISPR enzyme that is mutated to with respect to a corresponding wild-type enzyme such that the mutated CRISPR enzyme lacks the ability to cleave one or both strands of a target polynucleotide containing a target sequence can be used. A Cas protein (e.g., Cas9, Cas12) or a Cas domain (e.g., Cas9, Cas12) can refer to a polypeptide or domain with at least or at least about 50%, 60%, 70%, 80%, 90%, 91%, 92%, 93%, 94%, 95%, 96%, 97%, 98%, 99%, or 100% sequence identity and/or sequence homology to a wild-type exemplary Cas polypeptide or Cas domain. Cas (e.g., Cas9, Cas12) can refer to the wild-type or a modified form of the Cas protein that may comprise an amino acid change such as a deletion, insertion, substitution, variant, mutation, fusion, chimera, or any combination thereof.

[0342] In some embodiments, a CRISPR protein-derived domain of a base editor can include all or a portion (e.g., a functional portion) of Cas9 from Corynebacterium ulcerans (NCBI Refs: NC_015683.1, NC_017317.1); Corynebacterium diphtheria (NCBI Refs: NC_016782.1, NC_016786.1); Spiroplasma syrphidicola (NCBI Ref: NC_021284.1); Prevotella intermedia (NCBI Ref: NC_017861.1); Spiroplasma taiwanense (NCBI Ref: NC_021846.1); Streptococcus iniae (NCBI Ref: NC_021314.1); Belliella baltica (NCBI Ref: NC_018010.1); Psychroflexus torquis (NCBI Ref: NC_018721.1); Streptococcus thermophilus (NCBI Ref: YP_820832.1); Listeria innocua (NCBI Ref: NP_472073.1); Campylobacter jejuni (NCBI Ref: YP_002344900.1); Neisseria meningitidis (NCBI Ref: YP_002342100.1), Streptococcus pyogenes, or Staphylococcus aureus.

[0343] Some aspects of the disclosure provide high fidelity Cas9 domains. High fidelity Cas9 domains are known in the art and described, for example, in Kleinstiver, B. P., et al. “High-fidelity CRISPR-Cas9 nucleases with no detectable genome-wide off-target effects.” Nature 529, 490-495 (2016); and Slaymaker, I. M., et al. “Rationally engineered Cas9 nucleases with improved specificity.” Science 351, 84-88 (2015); the entire contents of each of which are incorporated herein by reference. An Exemplary high fidelity Cas9 domain is provided in the Sequence Listing as SEQ ID NO: 233.

[0344] In some embodiments, any of the Cas9 fusion proteins or complexes provided herein comprise one or more of a D10A, N497X, a R661X, a Q695X, and/or a Q926X mutation, or a corresponding mutation in any of the amino acid sequences provided herein, wherein X is any amino acid.

[0345] Typically, Cas9 proteins, such as Cas9 from S. pyogenes (spCas9), require a “protospacer adjacent motif (PAM)” or PAM-like motif, which is a 2-6 base pair DNA sequence immediately following the DNA sequence targeted by the Cas9 nuclease in the CRISPR bacterial adaptive immune system. The presence of an NGG PAM sequence is required to bind a particular nucleic acid region, where the “N” in “NGG” is adenosine (A), thymidine (T), or cytosine (C), and the G is guanosine. In some embodiments, any of the fusion proteins or complexes provided herein may contain a Cas9 domain that is capable of binding a nucleotide sequence that does not contain a canonical (e.g., NGG) PAM sequence. Cas9 domains that bind to non-canonical PAM sequences have been described in the art and would be apparent to the skilled artisan. For example, Cas9 domains that bind non-canonical PAM sequences have been described in Kleinstiver, B. P., et al., “Engineered CRISPR-Cas9 nucleases with altered PAM specificities” Nature 523, 481-485 (2015); and Kleinstiver, B. P., et al., “Broadening the targeting range of Staphylococcus aureus CRISPR-Cas9 by modifying PAM recognition” Nature Biotechnology 33, 1293-1298 (2015); the entire contents of each are hereby incorporated by reference.

[0346] In some embodiments, the napDNAbp is a circular permutant (e.g., SEQ ID NO: 238).

[0347] In some embodiments, the polynucleotide programmable nucleotide binding domain comprises a nickase domain. Herein the term “nickase” refers to a polynucleotide programmable nucleotide binding domain comprising a nuclease domain that is capable of cleaving only one strand of the two strands in a duplexed nucleic acid molecule (e.g., DNA). For example, where a polynucleotide programmable nucleotide binding domain comprises a nickase domain derived from Cas9, the Cas9-derived nickase domain can include a D10A mutation and a histidine at position 840. In another example, a Cas9-derived nickase domain comprises an H840A mutation, while the amino acid residue at position 10 remains a D.

[0348] In some embodiments, a Cas9 nuclease has an inactive (e.g., an inactivated) DNA cleavage domain, that is, the Cas9 is a nickase, referred to as an “nCas9” protein (for “nickase” Cas9; SEQ ID NO: 201). The Cas9 nickase may be a Cas9 protein that is capable of cleaving only one strand of a duplexed nucleic acid molecule (e.g., a duplexed DNA molecule). In some embodiments the Cas9 nickase comprises an amino acid sequence that is at least 60%, at least 65%, at least 70%, at least 75%, at least 80%, at least 85%, at least 90%, at least 95%, at least 96%, at least 97%, at least 98%, at least 99%, or at least 99.5% identical to any one of the Cas9 nickases provided herein. Additional suitable Cas9 nickases will be apparent to those of skill in the art based on this disclosure and knowledge in the field and are within the scope of this disclosure.

[0349] Also provided herein are base editors comprising a polynucleotide programmable nucleotide binding domain which is catalytically dead (i.e., incapable of cleaving a target polynucleotide sequence). For example, in the case of a base editor comprising a Cas9 domain, the Cas9 may comprise both a D10A mutation and an H840A mutation. In further embodiments, a catalytically dead polynucleotide programmable nucleotide binding domain comprises a point mutation (e.g., D10A or H840A) as well as a deletion of all or a portion (e.g., a functional portion) of a nuclease domain. dCas9 domains are known in the art and described, for example, in Qi et al., “Repurposing CRISPR as an RNA-guided platform for sequence-specific control of gene expression.” Cell. 2013; 152(5):1173-83, the entire contents of which are incorporated herein by reference.

[0350] The term “protospacer adjacent motif (PAM)” or PAM-like motif refers to a 2-6 base pair DNA sequence immediately following the DNA sequence targeted by a nucleic acid programmable DNA binding protein. In some embodiments, the PAM can be a 5′ PAM (i.e., located upstream of the 5′ end of the protospacer). In other embodiments, the PAM can be a 3′ PAM (i.e., located downstream of the 5′ end of the protospacer). The PAM sequence can be any PAM sequence known in the art. Suitable PAM sequences include, but are not limited to, NGG, NGA, NGC, NGN, NGT, NGTT, NGCG, NGAG, NGAN, NGNG, NGCN, NGCG, NGTN, NNGRRT, NNNRRT, NNGRR(N), TTTV, TYCV, TYCV, TATV, NNNNGATT, NNAGAAW, or NAAAAC. Y is a pyrimidine; N is any nucleotide base; W is A or T.

[0351] A base editor provided herein may comprise a CRISPR protein-derived domain that is capable of binding a nucleotide sequence that contains a canonical or non-canonical protospacer adjacent motif (PAM) sequence.

[0352] In some embodiments, the PAM is an “NRN” PAM where the “N” in “NRN” is adenine (A), thymine (T), guanine (G), or cytosine (C), and the R is adenine (A) or guanine (G); or the PAM is an “NYN” PAM, wherein the “N” in NYN is adenine (A), thymine (T), guanine (G), or cytosine (C), and the Y is cytidine (C) or thymine (T), for example, as described in R. T. Walton et al., 2020, Science, 10.1126/science.aba8853 (2020), the entire contents of which are incorporated herein by reference.

[0353] Several PAM variants are described in Table 3 below.

TABLE 3
Cas9 proteins and corresponding PAM sequences.
N is A, C, T, or G; and V is A, C, or G.

| Variant | PAM |
|---|---|
| spCas9 | NGG |
| spCas9-VRQR | NGA |
| spCas9-VRER | NGCG |
| xCas9 (sp) | NGN |
| saCas9 | NNGRRT |
| saCas9-KKH | NNNRRT |
| spCas9-LRKIQK | NGTN |
| spCas9-LRVSQK | NGTN |
| spCas9-LRVSQL | NGTN |
| Cpf1 | 5′ (TTTV) |
| SpyMac | 5′-NAA-3′ |

[0354] In some embodiments, the PAM is NGC. In some embodiments, the NGC PAM is recognized by a Cas9 variant. In some embodiments, the Cas9 variant contains one or more amino acid substitutions selected from D1135V, G1218R, R1335Q, and T1337R (collectively termed VRQR) of spCas9 (SEQ ID No: 197), or a corresponding mutation in another Cas9. In some embodiments, the Cas9 variant contains one or more amino acid substitutions selected from D1135V, G1218R, R1335E, and T1337R (collectively termed VRER) of spCas9 (SEQ ID No: 197), or a corresponding mutation in another Cas9. In some embodiments, the Cas9 variant contains one or more amino acid substitutions selected from E782K, N968K, and R1015H (collectively termed KHH) of saCas9 (SEQ ID NO: 218).

[0355] In some embodiments, a CRISPR protein-derived domain of a base editor comprises all or a portion (e.g., a functional portion) of a Cas9 protein with a canonical PAM sequence (NGG). In other embodiments, a Cas9-derived domain of a base editor can employ a non-canonical PAM sequence. Such sequences have been described in the art and would be apparent to the skilled artisan. For example, Cas9 domains that bind non-canonical PAM sequences have been described in Kleinstiver, B. P., et al., “Engineered CRISPR-Cas9 nucleases with altered PAM specificities” Nature 523, 481-485 (2015); and Kleinstiver, B. P., et al., “Broadening the targeting range of Staphylococcus aureus CRISPR-Cas9 by modifying PAM recognition” Nature Biotechnology 33, 1293-1298 (2015); R. T. Walton et al. “Unconstrained genome targeting with near-PAMless engineered CRISPR-Cas9 variants” Science 10.1126/science.aba8853 (2020); Hu et al. “Evolved Cas9 variants with broad PAM compatibility and high DNA specificity,” Nature, 2018 Apr. 5, 556(7699), 57-63; Miller et al., “Continuous evolution of SpCas9 variants compatible with non-G PAMs” Nat. Biotechnol., 2020 April; 38(4):471-481; the entire contents of each are hereby incorporated by reference.

Fusion Proteins or Complexes Comprising a NapDNAbp and a Cytidine Deaminase and/or Adenosine Deaminase

[0356] Some aspects of the disclosure provide fusion proteins or complexes comprising a Cas9 domain or other nucleic acid programmable DNA binding protein (e.g., Cas12) and one or more cytidine deaminase, adenosine deaminase, or cytidine adenosine deaminase domains. It should be appreciated that the Cas9 domain may be any of the Cas9 domains or Cas9 proteins (e.g., dCas9 or nCas9) provided herein. In some embodiments, any of the Cas9 domains or Cas9 proteins (e.g., dCas9 or nCas9) provided herein may be fused with any of the cytidine deaminases and/or adenosine deaminases provided herein. The domains of the base editors disclosed herein can be arranged in any order.

[0357] In some embodiments, the fusion proteins or complexes comprising a cytidine deaminase or adenosine deaminase and a napDNAbp (e.g., Cas9 or Cas12 domain) do not include a linker sequence. In some embodiments, a linker is present between the cytidine or adenosine deaminase and the napDNAbp. In some embodiments, cytidine or adenosine deaminase and the napDNAbp are fused via any of the linkers provided herein. For example, in some embodiments the cytidine or adenosine deaminase and the napDNAbp are fused via any of the linkers provided herein.

[0358] It should be appreciated that the fusion proteins or complexes of the present disclosure may comprise one or more additional features. For example, in some embodiments, the fusion protein or complex may comprise inhibitors, cytoplasmic localization sequences, export sequences, such as nuclear export sequences, or other localization sequences, as well as sequence tags that are useful for solubilization, purification, or detection of the fusion proteins or complexes. Suitable protein tags provided herein include, but are not limited to, biotin carboxylase carrier protein (BCCP) tags, myc-tags, calmodulin-tags, FLAG-tags, hemagglutinin (HA)-tags, polyhistidine tags, also referred to as histidine tags or His-tags, maltose binding protein (MBP)-tags, nus-tags, glutathione-S-transferase (GST)-tags, green fluorescent protein (GFP)-tags, thioredoxin-tags, S-tags, Softags (e.g., Softag 1, Softag 3), strep-tags, biotin ligase tags, FlAsH tags, V5 tags, and SBP-tags. Additional suitable sequences will be apparent to those of skill in the art. In some embodiments, the fusion protein or complex comprises one or more His tags.

[0359] Exemplary, yet nonlimiting, fusion proteins are described in International PCT Application Nos. PCT/US2017/045381, PCT/US2019/044935, and PCT/US2020/016288, each of which is incorporated herein by reference for its entirety.

Fusion Proteins or Complexes with Internal Insertions

[0360] Provided herein are fusion proteins or complexes comprising a heterologous polypeptide fused to a nucleic acid programmable nucleic acid binding protein, for example, a napDNAbp. The heterologous polypeptide can be fused to the napDNAbp at a C-terminal end of the napDNAbp, an N-terminal end of the napDNAbp, or inserted at an internal location of the napDNAbp. In some embodiments, the heterologous polypeptide is a deaminase (e.g., cytidine or adenosine deaminase) or a functional fragment thereof. For example, a fusion protein may comprise a deaminase flanked by an N-terminal fragment and a C-terminal fragment of a Cas9 or Cas12 (e.g., Cas12b/C2c1), polypeptide

[0361] The deaminase can be a circular permutant deaminase. In some embodiments, the deaminase is a circular permutant TadA, circularly permutated at amino acid residue 116, 136, or 65 as numbered in a TadA reference sequence.

[0362] The fusion protein or complexes may comprise more than one deaminase. The fusion protein or complex may comprise, for example, 1, 2, 3, 4, 5 or more deaminases. The deaminases in a fusion protein or complex can be adenosine deaminases, cytidine deaminases, or a combination thereof.

[0363] In some embodiments, the napDNAbp in the fusion protein or complex contains a Cas9 polypeptide or a fragment thereof. The Cas9 polypeptide can be a variant Cas9 polypeptide. The Cas9 polypeptide can be a circularly permuted Cas9 protein.

[0364] The heterologous polypeptide (e.g., deaminase) can be inserted in the napDNAbp (e.g., Cas9 or Cas12 (e.g., Cas12b/C2c1)) at a suitable location, for example, such that the napDNAbp retains its ability to bind the target polynucleotide and a guide nucleic acid. A deaminase (e.g., adenosine deaminase, cytidine deaminase, or adenosine deaminase and cytidine deaminase (dual deaminase)) can be inserted into a napDNAbp without compromising function of the deaminase (e.g., base editing activity) or the napDNAbp (e.g., ability to bind to target nucleic acid and guide nucleic acid).

[0365] In some embodiments, the deaminase (e.g., adenosine deaminase, cytidine deaminase, or adenosine deaminase and cytidine deaminase) is inserted in regions of the Cas9 polypeptide comprising higher than average B-factors (e.g., higher B factors compared to the total protein or the protein domain comprising the disordered region). Cas9 polypeptide positions comprising a higher than average B-factor can include, for example, residues 768, 792, 1052, 1015, 1022, 1026, 1029, 1067, 1040, 1054, 1068, 1246, 1247, and 1248 as numbered in the above Cas9 reference sequence. Cas9 polypeptide regions comprising a higher than average B-factor can include, for example, residues 792-872, 792-906, and 2-791 as numbered in the above Cas9 reference sequence.

[0366] In some embodiments, a heterologous polypeptide (e.g., deaminase) is inserted in a flexible loop of a Cas9 polypeptide. The flexible loop portions can be selected from the group consisting of 530-537, 569-570, 686-691, 943-947, 1002-1025, 1052-1077, 1232-1247, or 1298-1300 as numbered in the above Cas9 reference sequence, or a corresponding amino acid residue in another Cas9 polypeptide. The flexible loop portions can be selected from the group consisting of: 1-529, 538-568, 580-685, 692-942, 948-1001, 1026-1051, 1078-1231, or 1248-1297 as numbered in the above Cas9 reference sequence, or a corresponding amino acid residue in another Cas9 polypeptide.

[0367] A heterologous polypeptide (e.g., adenine deaminase) can be inserted into a Cas9 polypeptide region corresponding to amino acid residues: 1017-1069, 1242-1247, 1052-1056, 1060-1077, 1002-1003, 943-947, 530-537, 568-579, 686-691, 1242-1247, 1298-1300, 1066-1077, 1052-1056, or 1060-1077 as numbered in the above Cas9 reference sequence, or a corresponding amino acid residue in another Cas9 polypeptide.

[0368] A heterologous polypeptide (e.g., adenine deaminase) can be inserted in place of a deleted region of a Cas9 polypeptide. The deleted region can correspond to an N-terminal or C-terminal portion of the Cas9 polypeptide. Exemplary internal fusions base editors are provided in Table 4A below:

TABLE 4A
Insertion loci in Cas9 proteins

| BE ID | Modification | Other ID |
|---|---|---|
| IBE001 | Cas9 TadA ins 1015 | ISLAY01 |
| IBE002 | Cas9 TadA ins 1022 | ISLAY02 |
| IBE003 | Cas9 TadA ins 1029 | ISLAY03 |
| IBE004 | Cas9 TadA ins 1040 | ISLAY04 |
| IBE005 | Cas9 TadA ins 1068 | ISLAY05 |
| IBE006 | Cas9 TadA ins 1247 | ISLAY06 |
| IBE007 | Cas9 TadA ins 1054 | ISLAY07 |
| IBE008 | Cas9 TadA ins 1026 | ISLAY08 |
| IBE009 | Cas9 TadA ins 768 | ISLAY09 |
| IBE020 | delta HNH TadA 792 | ISLAY20 |
| IBE021 | N-term fusion single TadA helix truncated 165-end | ISLAY21 |
| IBE029 | TadA-Circular Permutant116 ins1067 | ISLAY29 |
| IBE031 | TadA- Circular Permutant 136 ins1248 | ISLAY31 |
| IBE032 | TadA- Circular Permutant 136ins 1052 | ISLAY32 |
| IBE035 | delta 792-872 TadA ins | ISLAY35 |
| IBE036 | delta 792-906 TadA ins | ISLAY36 |
| IBE043 | TadA-Circular Permutant 65 ins1246 | ISLAY43 |
| IBE044 | TadA ins C-term truncate2 791 | ISLAY44 |

[0369] A heterologous polypeptide (e.g., deaminase) can be inserted within a structural or functional domain of a Cas9 polypeptide. A heterologous polypeptide (e.g., deaminase) can be inserted between two structural or functional domains of a Cas9 polypeptide. A heterologous polypeptide (e.g., deaminase) can be inserted in place of a structural or functional domain of a Cas9 polypeptide, for example, after deleting the domain from the Cas9 polypeptide. The structural or functional domains of a Cas9 polypeptide can include, for example, RuvC I, RuvC II, RuvC III, Rec1, Rec2, PI, or HNH.

[0370] A fusion protein may comprise a linker between the deaminase and the napDNAbp polypeptide. The linker can be a peptide or a non-peptide linker. For example, the linker can be an XTEN, (GGGS)ₙ (SEQ ID NO: 246), SGGSSGGS (SEQ ID NO: 330), (GGGGS)ₙ (SEQ ID NO: 247), (G)ₙ, (EAAAK)n (SEQ ID NO: 248), (GGS)ₙ, SGSETPGTSESATPES (SEQ ID NO: 249). In some embodiments, the fusion protein comprises a linker between the N-terminal Cas9 fragment and the deaminase. In some embodiments, the fusion protein comprises a linker between the C-terminal Cas9 fragment and the deaminase. In some embodiments, the N-terminal and C-terminal fragments of napDNAbp are connected to the deaminase with a linker. In some embodiments, the N-terminal and C-terminal fragments are joined to the deaminase domain without a linker. In some embodiments, the fusion protein comprises a linker between the N-terminal Cas9 fragment and the deaminase but does not comprise a linker between the C-terminal Cas9 fragment and the deaminase. In some embodiments, the fusion protein comprises a linker between the C-terminal Cas9 fragment and the deaminase but does not comprise a linker between the N-terminal Cas9 fragment and the deaminase.

[0371] In some embodiments, the napDNAbp in the fusion protein or complex is a Cas12 polypeptide, e.g., Cas12b/C2cl, or a functional fragment thereof capable of associating with a nucleic acid (e.g., a gRNA) that guides the Cas12 to a specific nucleic acid sequence. The Cas12 polypeptide can be a variant Cas12 polypeptide. In other embodiments, the N- or C-terminal fragments of the Cas12 polypeptide comprise a nucleic acid programmable DNA binding domain or a RuvC domain. In other embodiments, the fusion protein contains a linker between the Cas12 polypeptide and the catalytic domain. In other embodiments, the amino acid sequence of the linker is GGSGGS (SEQ ID NO: 250) or GSSGSETPGTSESATPESSG (SEQ ID NO: 251). In other embodiments, the linker is a rigid linker. In other embodiments of the above aspects, the linker is encoded by GGAGGCTCTGGAGGAAGC (SEQ ID NO: 252) or GGCTCTTCTGGATCTGAAACACCTGGCACAAGCGAGAGCGCCACCCCTGAGAGCTCTGGC (SEQ ID NO: 253).

[0372] In other embodiments, the fusion protein or complex contains a nuclear localization signal (e.g., a bipartite nuclear localization signal). In other embodiments, the amino acid sequence of the nuclear localization signal is MAPKKKRKVGIHGVPAA (SEQ ID NO: 261). In other embodiments of the above aspects, the nuclear localization signal is encoded by the following sequence:
[0373] ATGGCCCCAAAGAAGAAGCGGAAGGTCGGTATCCACGGAGTCCCAGCAGCC (SEQ ID NO: 262). In other embodiments, the Cas12b polypeptide contains a mutation that silences the catalytic activity of a RuvC domain. In other embodiments, the Cas12b polypeptide contains D574A, D829A and/or D952A mutations.

[0374] In some embodiments, the fusion protein or complex comprises a napDNAbp domain (e.g., Cas12-derived domain) with an internally fused nucleobase editing domain (e.g., all or a portion (e.g., a functional portion) of a deaminase domain, e.g., an adenosine deaminase domain). In some embodiments, the napDNAbp is a Cas12b. In some embodiments, the base editor comprises a BhCas12b domain with an internally fused TadA*8 domain inserted at the loci provided in Table 4B below.

TABLE 4B
Insertion loci in Cas12b proteins

| | Insertion | Inserted |
|---|---|---|
| | site | between aa |
| BhCas12b | | |
| position 1 | 153 | PS |
| position 2 | 255 | KE |
| position 3 | 306 | DE |
| position 4 | 980 | DG |
| position 5 | 1019 | KL |
| position 6 | 534 | FP |
| position 7 | 604 | KG |
| position 8 | 344 | HF |
| BvCas12b | | |
| position 1 | 147 | PD |
| position 2 | 248 | GG |
| position 3 | 299 | PE |
| position 4 | 991 | GE |
| position 5 | 1031 | KM |
| AaCas12b | | |
| position 1 | 157 | PG |
| position 2 | 258 | VG |
| position 3 | 310 | DP |
| position 4 | 1008 | GE |
| position 5 | 1044 | GK |

[0375] In some embodiments, the base editing system described herein is an ABE with TadA inserted into a Cas9. Polypeptide sequences of relevant ABEs with TadA inserted into a Cas9 are provided in the attached Sequence Listing as SEQ ID NOs: 263-308.

[0376] Exemplary, yet nonlimiting, fusion proteins are described in International PCT Application Nos. PCT/US2020/016285 and U.S. Provisional Application Nos. 62/852,228 and 62/852,224, the contents of which are incorporated by reference herein in their entireties.

### A to G Editing

[0377] In some embodiments, a base editor described herein comprises an adenosine deaminase domain. Such an adenosine deaminase domain of a base editor can facilitate the editing of an adenine (A) nucleobase to a guanine (G) nucleobase by deaminating the A to form inosine (I), which exhibits base pairing properties of G. In some embodiments, an A-to-G base editor further comprises an inhibitor of inosine base excision repair, for example, a uracil glycosylase inhibitor (UGI) domain or a catalytically inactive inosine specific nuclease. Without wishing to be bound by any particular theory, the UGI domain or catalytically inactive inosine specific nuclease can inhibit or prevent base excision repair of a deaminated adenosine residue (e.g., inosine), which can improve the activity or efficiency of the base editor.

[0378] A base editor comprising an adenosine deaminase can act on any polynucleotide, including DNA, RNA and DNA-RNA hybrids. In an embodiment an adenosine deaminase domain of a base editor comprises all or a portion (e.g., a functional portion) of an ADAT comprising one or more mutations which permit the ADAT to deaminate a target A in DNA.

[0379] For example, the base editor may comprise all or a portion (e.g., a functional portion) of an ADAT from Escherichia coli (EcTadA) comprising one or more of the following mutations: D108N, A106V, D147Y, E155V, L84F, H123Y, I156F, or a corresponding mutation in another adenosine deaminase. Exemplary ADAT homolog polypeptide sequences are provided in the Sequence Listing as SEQ ID NOs: 1 and 309-315.

[0380] The adenosine deaminase can be derived from any suitable organism (e.g., E. coli). In some embodiments, the adenosine deaminase is from Escherichia coli, Staphylococcus aureus, Salmonella typhi, Shewanella putrefaciens, Haemophilus influenzae, Caulobacter crescentus, or Bacillus subtilis. In some embodiments, the adenine deaminase is a naturally-occurring adenosine deaminase that includes one or more mutations corresponding to any of the mutations provided herein (e.g., mutations in ecTadA). The corresponding residue in any homologous protein can be identified by e.g., sequence alignment and determination of homologous residues. The mutations in any naturally-occurring adenosine deaminase (e.g., having homology to ecTadA) that correspond to any of the mutations described herein (e.g., any of the mutations identified in ecTadA) can be generated accordingly.

[0381] In some embodiments, the adenosine deaminase comprises an amino acid sequence that is at least 60%, at least 65%, at least 70%, at least 75%, at least 80%, at least 85%, at least 90%, at least 95%, at least 96%, at least 97%, at least 98%, at least 99%, or at least 99.5% identical to any one of the amino acid sequences set forth in any of the adenosine deaminases provided herein. It should be appreciated that adenosine deaminases provided herein may include one or more mutations (e.g., any of the mutations provided herein). The disclosure provides any deaminase domains with a certain percent identify plus any of the mutations or combinations thereof described herein. In some embodiments, the adenosine deaminase comprises an amino acid sequence that has 1, 2, 3, 4, 5, 6, 7, 8, 9, 10, 11, 12, 13, 14, 15, 16, 17, 18, 19, 20, 21, 22, 21, 24, 25, 26, 27, 28, 29, 30, 31, 32, 33, 34, 35, 36, 37, 38, 39, 40, 41, 42, 43, 44, 45, 46, 47, 48, 49, 50, or more mutations compared to a reference sequence, or any of the adenosine deaminases provided herein.

[0382] It should be appreciated that any of the mutations provided herein (e.g., based on a TadA reference sequence, such as TadA*7.10 (SEQ ID NO: 1)) can be introduced into other adenosine deaminases, such as E. coli TadA (ecTadA), S. aureus TadA (saTadA), or other adenosine deaminases (e.g., bacterial adenosine deaminases). In some embodiments, the TadA reference sequence is TadA*7.10 (SEQ ID NO: 1). It would be apparent to the skilled artisan that additional deaminases may similarly be aligned to identify homologous amino acid residues that can be mutated as provided herein. Thus, any of the mutations identified in a TadA reference sequence can be made in other adenosine deaminases (e.g. ecTada) that have homologous amino acid residues. It should also be appreciated that any of the mutations provided herein can be made individually or in any combination in a TadA reference sequence or another adenosine deaminase.

[0383] In some embodiments, the adenosine deaminase comprises an alteration or set of alterations selected from those listed in Tables 5A-5E below:

TABLE 5A
Adenosine Deaminase Variants. Residue positions in the E. coli TadA variant (TadA*) are indicated.

| | 23 | 26 | 36 | 37 | 48 | 49 | 51 | 72 | 84 | 87 | 106 | 108 | 123 | 125 | 142 | 146 | 147 | 152 | 155 | 156 | 157 | 161 |
|---|---|---|---|---|---|---|---|---|---|---|---|---|---|---|---|---|---|---|---|---|---|---|
| TadA*0.1 | W | R | H | N | P | | R | N | L | S | A | D | H | G | A | S | D | R | E | I | K | K |
| TadA*0.2 | W | R | H | N | P | | R | N | L | S | A | D | H | G | A | S | D | R | E | I | K | K |
| TadA*1.1 | W | R | H | N | P | | R | N | L | S | A | N | H | G | A | S | D | R | E | I | K | K |
| TadA*1.2 | W | R | H | N | P | | R | N | L | S | V | N | H | G | A | S | D | R | E | I | K | K |
| TadA*2.1 | W | R | H | N | P | | R | N | L | S | V | N | H | G | A | S | Y | R | V | I | K | K |
| TadA*2.2 | W | R | H | N | P | | R | N | L | S | V | N | H | G | A | S | Y | R | V | I | K | K |
| TadA*2.3 | W | R | H | N | P | | R | N | L | S | V | N | H | G | A | S | Y | R | V | I | K | K |
| TadA*2.4 | W | R | H | N | P | | R | N | L | S | V | N | H | G | A | S | Y | R | V | I | K | K |
| TadA*2.5 | W | R | H | N | P | | R | N | L | S | V | N | H | G | A | S | Y | R | V | I | K | K |
| TadA*2.6 | W | R | H | N | P | | R | N | L | S | V | N | H | G | A | S | Y | R | V | I | K | K |
| TadA*2.7 | W | R | H | N | P | | R | N | L | S | V | N | H | G | A | S | Y | R | V | I | K | K |
| TadA*2.8 | W | R | H | N | P | | R | N | L | S | V | N | H | G | A | S | Y | R | V | I | K | K |
| TadA*2.9 | W | R | H | N | P | | R | N | L | S | V | N | H | G | A | S | Y | R | V | I | K | K |
| TadA*2.10 | W | R | H | N | P | | R | N | L | S | V | N | H | G | A | S | Y | R | V | I | K | K |
| TadA*2.11 | W | R | H | N | P | | R | N | L | S | V | N | H | G | A | S | Y | R | V | I | K | K |
| TadA*2.12 | W | R | H | N | P | | R | N | L | S | V | N | H | G | A | S | Y | R | V | I | K | K |
| TadA*3.1 | W | R | H | N | P | | R | N | F | S | V | N | Y | G | A | S | Y | R | V | F | K | K |
| TadA*3.2 | W | R | H | N | P | | R | N | F | S | V | N | Y | G | A | S | Y | R | V | F | K | K |
| TadA*3.3 | W | R | H | N | P | | R | N | F | S | V | N | Y | G | A | S | Y | R | V | F | K | K |
| TadA*3.4 | W | R | H | N | P | | R | N | F | S | V | N | Y | G | A | S | Y | R | V | F | K | K |
| TadA*3.5 | W | R | H | N | P | | R | N | F | S | V | N | Y | G | A | S | Y | R | V | F | K | K |
| TadA*3.6 | W | R | H | N | P | | R | N | F | S | V | N | Y | G | A | S | Y | R | V | F | K | K |
| TadA*3.7 | W | R | H | N | P | | R | N | F | S | V | N | Y | G | A | S | Y | R | V | F | K | K |
| TadA*3.8 | W | R | H | N | P | | R | N | F | S | V | N | Y | G | A | S | Y | R | V | F | K | K |
| TadA*4.1 | W | R | H | N | P | | R | N | L | S | V | N | H | G | N | S | Y | R | V | I | K | K |
| TadA*4.2 | W | G | H | N | P | | R | N | L | S | V | N | H | G | N | S | Y | R | V | I | K | K |
| TadA*4.3 | W | R | H | N | P | | R | N | F | S | V | N | Y | G | N | S | Y | R | V | F | K | K |
| TadA*5.1 | W | R | L | N | P | | L | N | F | S | V | N | Y | G | A | C | Y | R | V | F | N | K |
| TadA*5.2 | W | R | H | S | P | | R | N | F | S | V | N | Y | G | A | S | Y | R | V | F | K | T |
| TadA*5.3 | W | R | L | N | P | | L | N | I | S | V | N | Y | G | A | C | Y | R | V | F | N | K |
| TadA*5.4 | W | R | H | S | P | | R | N | F | S | V | N | Y | G | A | S | Y | R | V | F | K | T |
| TadA*5.5 | W | R | L | N | P | | L | N | F | S | V | N | Y | G | A | C | Y | R | V | F | N | K |
| TadA*5.6 | W | R | L | N | P | | L | N | F | S | V | N | Y | G | A | C | Y | R | V | F | N | K |
| TadA*5.7 | W | R | L | N | P | | L | N | F | S | V | N | Y | G | A | C | Y | R | V | F | N | K |
| TadA*5.8 | W | R | L | N | P | | L | N | F | S | V | N | Y | G | A | C | Y | R | V | F | N | K |
| TadA*5.9 | W | R | L | N | P | | L | N | F | S | V | N | Y | G | A | C | Y | R | V | F | N | K |
| TadA*5.10 | W | R | L | N | P | | L | N | F | S | V | N | Y | G | A | C | Y | R | V | F | N | K |
| TadA*5.11 | W | R | L | N | P | | L | N | F | S | V | N | Y | G | A | C | Y | R | V | F | N | K |
| TadA*5.12 | W | R | L | N | P | | L | N | F | S | V | N | Y | G | A | C | Y | R | V | F | N | K |
| TadA*5.13 | W | R | H | N | P | | L | D | F | S | V | N | Y | A | A | S | Y | R | V | F | K | K |
| TadA*5.14 | W | R | H | N | S | | L | N | F | C | V | N | Y | G | A | S | Y | R | V | F | K | K |
| TadA*6.1 | W | R | H | N | S | | L | N | F | S | V | N | Y | G | N | S | Y | R | V | F | K | K |
| TadA*6.2 | W | R | H | N | T | V | L | N | F | S | V | N | Y | G | N | S | Y | R | V | F | N | K |
| TadA*6.3 | W | R | L | N | S | | L | N | F | S | V | N | Y | G | A | C | Y | R | V | F | N | K |
| TadA*6.4 | W | R | L | N | S | | L | N | F | S | V | N | Y | G | N | C | Y | R | V | F | N | K |
| TadA*6.5 | W | R | L | N | T | V | L | N | F | S | V | N | Y | G | A | C | Y | R | V | F | N | K |
| TadA*6.6 | W | R | L | N | T | V | L | N | F | S | V | N | Y | G | N | C | Y | R | V | F | N | K |
| TadA*7.1 | W | R | L | N | A | | L | N | F | S | V | N | Y | G | A | C | Y | R | V | F | N | K |
| TadA*7.2 | W | R | L | N | A | | L | N | F | S | V | N | Y | G | N | C | Y | R | V | F | N | K |
| TadA*7.3 | L | R | L | N | A | | L | N | F | S | V | N | Y | G | A | C | Y | R | V | F | N | K |
| TadA*7.4 | R | R | L | N | A | | L | N | F | S | V | N | Y | G | A | C | Y | R | V | F | N | K |
| TadA*7.5 | W | R | L | N | A | | L | N | F | S | V | N | Y | G | A | C | Y | H | V | F | N | K |
| TadA*7.6 | W | R | L | N | A | | L | N | I | S | V | N | Y | G | A | C | Y | P | V | F | N | K |
| TadA*7.7 | L | R | L | N | A | | L | N | F | S | V | N | Y | G | A | C | Y | P | V | F | N | K |
| TadA*7.8 | L | R | L | N | A | | L | N | F | S | V | N | Y | G | N | C | Y | R | V | F | N | K |
| TadA*7.9 | L | R | L | N | A | | L | N | F | S | V | N | Y | G | N | C | Y | P | V | F | N | K |
| TadA*7.10 | R | R | L | N | A | | L | N | F | S | V | N | Y | G | A | C | Y | P | V | F | N | K |

TABLE 5B
TadA*8 Adenosine Deaminase Variants. Residue positions in the E. coli TadA variant
(TadA*) are indicated. Alterations are referenced to TadA*7.10 (first row).

| | 23 | 36 | 48 | 51 | 76 | 82 | 84 | 106 | 108 | 123 | 146 | 147 | 152 | 154 | 155 | 156 | 157 | 166 |
|---|---|---|---|---|---|---|---|---|---|---|---|---|---|---|---|---|---|---|
| TadA*7.10 | R | L | A | L | I | V | F | V | N | Y | C | Y | P | Q | V | F | N | T |
| TadA*8.1 | | | | | | | | | | | | T | | | | | | |
| TadA*8.2 | | | | | | | | | | | | R | | | | | | |
| TadA*8.3 | | | | | | | | | | | | | | S | | | | |
| TadA*8.4 | | | | | | | | | | H | | | | | | | | |
| TadA*8.5 | | | | | | S | | | | | | | | | | | | |
| TadA*8.6 | | | | | | | | | | | | | | | | | | R |
| TadA*8.7 | | | | | | | | | | | | | | R | | | | |
| TadA*8.8 | | | | | | | | | | H | | R | | R | | | | |
| TadA*8.9 | | | | | Y | | | | | | | R | | R | | | | |
| TadA*8.10 | | | | | | | | | | | | R | | R | | | | R |
| TadA*8.11 | | | | | | | | | | | | T | | R | | | | |
| TadA*8.12 | | | | | | | | | | | | T | | S | | | | |
| TadA*8.13 | | | | | Y | | | | | H | | R | | R | | | | |
| TadA*8.14 | | | | | Y | S | | | | | | | | | | | | |
| TadA*8.15 | | | | | | S | | | | | | R | | | | | | |
| TadA*8.16 | | | | | | S | | | | H | | R | | | | | | |
| TadA*8.17 | | | | | | S | | | | | | | | R | | | | |
| TadA*8.18 | | | | | | S | | | | H | | | | R | | | | |
| TadA*8.19 | | | | | | S | | | | H | | R | | R | | | | |
| TadA*8.20 | | | | | Y | S | | | | H | | R | | R | | | | |
| TadA*8.21 | | | | | | | | | | | | R | | S | | | | |
| TadA*8.22 | | | | | | S | | | | | | | | S | | | | |
| TadA*8.23 | | | | | | S | | | | H | | | | | | | | |
| TadA*8.24 | | | | | | S | | | | H | | T | | | | | | |

TABLE 5C
TadA*9 Adenosine Deaminase Variants. Alterations are referenced to TaadA*7.10.
Additional details of TadA*9 adenosine deaminases are described in
International PCT Application No. PCT/US2020/049975, which is incorporated
herein by reference in its entirety for all purposes.

| TadA*9 Description | Alterations |
|---|---|
| TadA*9.1 | E25F, V82S, Y123H, T133K, Y147R, Q154R |
| TadA*9.2 | E25F, V82S, Y123H, Y147R, Q154R |
| TadA*9.3 | V82S, Y123H, P124W, Y147R, Q154R |
| TadA*9.4 | L51W, V82S, Y123H, C146R, Y147R, Q154R |
| TadA*9.5 | P54C, V82S, Y123H, Y147R, Q154R |
| TadA*9.6 | Y73S, V82S, Y123H, Y147R, Q154R |
| TadA*9.7 | N38G, V82T, Y123H, Y147R, Q154R |
| TadA*9.8 | R23H, V82S, Y123H, Y147R, Q154R |
| TadA*9.9 | R21N, V82S, Y123H, Y147R, Q154R |
| TadA*9.10 | V82S, Y123H, Y147R, Q154R, A158K |
| TadA*9.11 | N72K, V82S, Y123H, D139L, Y147R, Q154R, |
| TadA*9.12 | E25F, V82S, Y123H, D139M, Y147R, Q154R |
| TadA*9.13 | M70V, V82S, M94V, Y123H, Y147R, Q154R |
| TadA*9.14 | Q71M, V82S, Y123H, Y147R, Q154R |
| TadA*9.15 | E25F, V82S, Y123H, T133K, Y147R, Q154R |
| TadA*9.16 | E25F, V82S, Y123H, Y147R, Q154R |
| TadA*9.17 | V82S, Y123H, P124W, Y147R, Q154R |
| TadA*9.18 | L51W, V82S, Y123H, C146R, Y147R, Q154R |
| TadA*9.19 | P54C, V82S, Y123H, Y147R, Q154R |
| TadA*9.2 | Y73S, V82S, Y123H, Y147R, Q154R |
| TadA*9.21 | N38G, V82T, Y123H, Y147R, Q154R |
| TadA*9.22 | R23H, V82S, Y123H, Y147R, Q154R |
| TadA*9.23 | R21N, V82S, Y123H, Y147R, Q154R |
| TadA*9.24 | V82S, Y123H, Y147R, Q154R, A158K |
| TadA*9.25 | N72K, V82S, Y123H, D139L, Y147R, Q154R, |
| TadA*9.26 | E25F, V82S, Y123H, D139M, Y147R, Q154R |
| TadA*9.27 | M70V, V82S, M94V, Y123H, Y147R, Q154R |
| TadA*9.28 | Q71M, V82S, Y123H, Y147R, Q154R |
| TadA*9.29 | E25F_I76Y_V82S_Y123H_Y147R_Q154R |
| TadA*9.30 | I76Y_V82T_Y123H_Y147R_Q154R |
| TadA*9.31 | N38G_I76Y_V82S_Y123H_Y147R_Q154R |
| TadA*9.32 | N38G_I76Y_V82T_Y123H_Y147R_Q154R |
| TadA*9.33 | R23H_I76Y_V82S_Y123H_Y147R_Q154R |
| TadA*9.34 | P54C_I76Y_V82S_Y123H_Y147R_Q154R |
| TadA*9.35 | R21N_I76Y_V82S_Y123H_Y147R_Q154R |
| TadA*9.36 | I76Y_V82S_Y123H_D138M_Y147R_Q154R |
| TadA*9.37 | Y72S_I76Y_V82S_Y123H_Y147R_Q154R |
| TadA*9.38 | E25F_I76Y_V82S_Y123H_Y147R_Q154R |
| TadA*9.39 | I76Y_V82T_Y123H_Y147R_Q154R |
| TadA*9.40 | N38G_I76Y_V82S_Y123H_Y147R_Q154R |
| TadA*9.41 | N38G_I76Y_V82T_Y123H_Y147R_Q154R |
| TadA*9.42 | R23H_I76Y_V82S_Y123H_Y147R_Q154R |
| TadA*9.43 | P54C_I76Y_V82S_Y123H_Y147R_Q154R |
| TadA*9.44 | R21N_I76Y_V82S_Y123H_Y147R_Q154R |
| TadA*9.45 | I76Y_V82S_Y123H_D138M_Y147R_Q154R |
| TadA*9.46 | Y72S_I76Y_V82S_Y123H_Y147R_Q154R |
| TadA*9.47 | N72K_V82S, Y123H, Y147R, Q154R |
| TadA*9.48 | Q71M_V82S, Y123H, Y147R, Q154R |
| TadA*9.49 | M70V, V82S, M94V, Y123H, Y147R, Q154R |
| TadA*9.50 | V82S, Y123H, T133K, Y147R, Q154R |
| TadA*9.51 | V82S, Y123H, T133K, Y147R, Q154R, A158K |
| TadA*9.52 | M70V, Q71M, N72K, V82S, Y123H, Y147R, Q154R |
| TadA*9.53 | N72K_V82S, Y123H, Y147R, Q154R |
| TadA*9.54 | Q71M_V82S, Y123H, Y147R, Q154R |
| TadA*9.55 | M70V, V82S, M94V, Y123H, Y147R, Q154R |
| TadA*9.56 | V82S, Y123H, T133K, Y147R, Q154R |
| TadA*9.57 | V82S, Y123H, T133K, Y147R, Q154R, A158K |
| TadA*9.58 | M70V, Q71M, N72K, V82S, Y123H, Y147R, Q154R |

[0384] In some embodiments, the adenosine deaminase comprises a TadA*8.20 adenosine deaminase variant further comprising an F149Y amino acid alteration. In some embodiments, the adenosine deaminase comprises a TadA*8.20 adenosine deaminase variant further comprising the amino acid alterations R1471D, F149Y, T1661, and D167N (TadA*8.10+). In some embodiments, the adenosine deaminase comprises a TadA*8.20 adenosine deaminase variant further comprising the amino acid alterations S82T and F149Y (TadA*9v1). In some embodiments, the adenosine deaminase comprises a TadA*8.20 adenosine deaminase variant further comprising the amino acid alterations Y147D, F149Y, T166I, D167N and S82T (TadA*9v2).

[0385] In some embodiments, the adenosine deaminase comprises one or more of MI, MIS, S2A, S2E, S2H, S2R, S2L, E3L, V4D, V4E, V4M, V4K, V4S, V4T, V4A, E5K, F6S, F6G, F6H, F6Y, F6I, F6E, S7K, H8E, H8Y, H8H, H8Q, H8E, H8G, H8S, E9Y, E9K, E9V, E9E, Y10F, Y10W, Y10Y, M12S, M12L, M12R, M12W, R13H, R13I, R13Y, R13R, R13G, R13S, H14N, A15D, A15V, A15L, A15H, T17T, T17A, T17W, T17L, T17F, T17R, T17S, L18A, L18E, L18N, L18L, L18S, A19N, A19H, A19K, A19A, A19D, A19G, A19M, R21N, K20K, K20A, K20R, K20E, K20G, K20C, K20Q R21A, R21R, R21N, R21Y, R21C G22P, A22W, A22R, W23D, R23H, W23G, W23Q, W23L, W23R, W23H W23D W23M, W23W, W23I, D24E, D24G, D24W, D24D, D24R, E25F, E25M, E25D, E25A, E25G, E25R, E25E, E25H E25V, E25S, E25Y, R26D, R26E, R26G, R26N, R26Q, R26C, R26L, R26K, R26W, R26C, R26P, R26R, R26A, R26H, E27E, E27Q, E27H, E27C, E27G, E27K, E27S, E27P, E27R, E27L, E27V, E27D, V28V, V28A, V28C, V28G, V28P, V28S, V28T, P29V, P29P, P29A, P29G, P29K, P29L, V30V, V30I, V30L, V30F, V30G, V30A, V30M, L34S, L34V, L34L, L34M, L34W, L34G, H36E, H36V, L36H, H36L, H36N, N37N, N37H, N37R, N37T, N37S, N38G, N38R, N38N, N38E, V40I, W45A, W45W, W45R, W45L, W45N, N46N, N46M, N46P, N46G, N46L, N46R, N46V, R46W, R46F, R46Q, R46M, R47A, R47Q, R47F, R47K, R47P, R47W, R47M, R47R, R47G, R47S, R47V, R47H, P48T, P48L, P48A, P48I, P48S, P48R, P48K, P48D, P48E, P48H, P48G, P48P, P48N, I49G, I49H, I49V, I49F, I49H, I49I, I49M, I49N, I49K, I49Q, I49T, G50L, G50S, G50R, G50G, R51H, R51L, R51N, L51W, R51Y, R51G, R51V, R51R, H52D, H52Y, H52I, H52H, D53D, D53E, D53G, D53P, P54C, P54T, P54P, P54E, A55H, T55A, T55I, T55V, T55G, T55T, A56A, A56H, A56W, A56E, A56S, H57P, H57A, H57H, H57N, A58G, A58E, A58A, A58R, E59A, E59G, E591, E59Q, E59W, E59E, E59T, E59H, E59P, M61A, M61I, M61L, M61V, M61P, M61G, M61I, L63S, L63V, L63T, L63R, L63H, L63A, R64A, R64Q, R64R, R64D, Q65V, Q65H, Q65G, Q65P, Q65F, Q65Q, Q65R, G66V, G66E, G66T, G66G, G66C, G67G, G67W, G67I, G67A, G67D, G67L, G67V, L68Q, L68M, L68V, L68H, L68L, L68G, V69A, V69M, V69V, M70V, M70L, E70A, M70A, M70M, M70E, M70T, M70v, Q71M, Q71N, Q71L, Q71R, Q71Q, Q711, N72A, N72K, N72S, N72D, N72Y, N72N, N72H, N72G, N72M, Y73G, Y73I, Y73K, Y73R, Y73S, Y73Y, Y73H, Y73A, R74A, R74Q, R74G, R74K, R74L, R74N, R74G, R74K, R74R, I76H, I76R, I76W, I76Y, I76V, I76Q, I76L, I76D, I76F, I76I, I76N, I76T, I76Y, D77G, D77D, D77A, D77Q, A78Y, A78T, A78G, A78A, A78I, T79M, T79R, T79L, T79T, L80M, L80Y, L80I, L80V, L80L, Y81D, Y81V, Y81Y, Y81M, V82A, V82S, V82G, V82T, V82V, V82Q, V82Y, T83L, T83F, T83T, T83N, L84E, L84F, L84Y, L84I, L84L, L84M, L84A, L84T, L84S, E85K, E85G, E85P, E85S, E85E, E85F, E85V, E85R, P86T, P86C, P86P, P86L, P86N, P86K, P86H, C87M, C87I, C87S, C87N, C87P, S87C, S87L, S87V, V88A, V88M, V88V, V88T, V88E, V88D, V88S, C90S, C90P, C90A, C90T, C90M, A91A, A91G, A91S, A91V, A91T, A91C, A91L, G92T, G92M, G92A, G92Y, G92G, A93I, A93C, A93M, A93V, A93A, M94M, M94T, M94A, M94V, M94L, M94I, M94H, I95S, I95G, I95L, I95H, I95V, H96A, H96L, H96R, H96S, H96H, H96N, H96E, S97C, S97G, S97I, S97M, S97R, S97S, S97P, R98K, R98I, R98N, R98Q, R98G, R98H, R98C, R98L, R98R, G100R, G100V, G100K, G100A, G100S, G100M, G100I, R101V, R101R, R101S, R101C, V102A, V102F, V1021, V102V, D103A, V103A, V103G, V103F, V103V, F104G, D104N, F104V, F104I, F104L, F104A, F104F, F104R, G105V, G105W, G105G, G105M, G105A, A106T, V106Q, V106F, V106W, V106M, A106A, A106Q, A106F, A106G, A106W, A106M, A106V, A106R, A106L, A106S, A106B, A106I, R107C, R107G, R107P, R107K, R107A, R107N, R107W, R107H, R107S, R107R, R107F, D108N, D108F, D108G, D108V, D108A, D108Y, D108H, D108I, D108K, D108L, D108M, D108Q, N108Q, N108F, N108W, N108M, N108K, D108K, D108F, D108M, D108Q, D108R, D108W, D108S, D108E, D108T, D108R, D108D, A109H, A109K, A109R, A109S, A109T, A109V, A109A, A109D, K110G, K110H, K110I, K110R, K110T, K110K, K110A, K1101, T111A, T111G, T111H, T111R, T111T, T111K, G112A, G112G, G112H, G112T, G112R, A113N, A114G, A114H, A114V, A114C, A114S, A114A, G115S, G115G, G115M, G115L, G115A, G115F, L117M, L117L, L117W, L117A, L117S, L117N, L117V, M118D, M118G, M118K, M118N, M118V, M118M, M118L, M118R, D119L, D119N, D119S, D119V, D119D, V120H, V120L, V120V, V120T, V120A, V120E, V120G, V120D, L121D, L121M, L121N, L121K, L121L, H122H, H122N, H122P, H122R, H122S, H122Y, H122G, H122T, H122L, H123C, H123G, H123P, H123V, H123Y, Y123H, H123Y, H123H, P124P, P124H, P124A, P124Y, P124D, P124G, P124I, P124L, P124W, G125H, G125I, G125A, G125M, G125K, G125G, G125P, M126D, M126H, M126K, M126I, M126N, M1260, M126S, M126Y, M126M, M126G, N127H, N127S, N127D, N127K, N127R, N127N, N127I, N127P, N127M, H128R, H128N, H128L, H128H, R129H, R129Q, R129V, R129I, R129E, R129V, R129R, R129M, R129P, V130R, V130V, V130E, V130D, E131E, E1311, E131V, E131K, I132I, I132F, I132T, I132L, I132V, I132E, T133V, T133E, T133G, T133K, T133T, T133A, T133H, T133F, T133I, E134A, E134E, E134G, E1341, E134H, E134K, E134T, G135G, G135V, G135I, G135P, G135E, I136G, I136L, I136T, I136I, I137A, I137D, I137E, L137M, I137S, L137L, L137I, A138D, A138E, A138G, S138A, A138N, A138S, A138T, A138V, A138Y, A138A, A138M, A138L, D139E, D139I, D139C, D139L, D139M, D139D, D139G, D139H, D139A, E140A, E140C, E140L, E140R, E140K, E140E, E140D, C141S, C141A, C141C, C141V, C141E, A142N, A142D, A142G, A142A, A142L, A142S, A142T, A142N, A142S, A142V, A142E, A142C, A143D, A143E, A143G, A143D, A143G, A143E, A143L, A143W, A143M, A143S, A143Q, A143R, A143A, A143I, L144S, L144L, L144T, L144A, L145A, L145F, L145G, L145D, L145L, L145C, L145E, L145s, C146R, S146A, S146C, S146D, S146F, S146R, S146T, S146D, S146G, S146S, S146L, D147D, D147L, D147F, D147G, D147Y, Y147T, Y147R, Y147D, D147R, D147Y, D147A, D147T, D147H, D147F, D147U, D147V, D1471, D147C, F148L, F148F, F148R, F148Y, F148A, F148T, F149C, F149M, F149R, F149Y, F149N, F149F, F149A, F149T, F149V R150R, R150M, R150D, R150F, M151F, M151P, M151R, M151V, M151M, M151E, R152C, R152F, R152H, R152P, R152R, R152P, R152Q, R152M, R1520, R153C, R153Q, R153R, R153V, R153E, R153A, R153P, Q154E, Q154H, Q154M, Q154R, Q154L, Q154S, Q154V, Q154Q, Q154F, Q1541, Q154A, Q154K, E155F, E155G, E1551, E155K, E155P, E155V, E155D, E155E, E155L, E155Q, I156V, I156A, I156I, I156L, I156F, I156D, I156K, I156N, I156R, I156Y, E157A, E157F, E157I, E157P, E157T, E157V, N157K, K157N, K157V, K157P, K157I, K157F, K157F, K157T, K157A, K157S, K157R, A158Q, A158K, A158V, A158A, A158D, A158S, A158T, A158N, Q159S, Q159Q, Q159A, Q159F, Q159K, Q159L, Q159N, K160A, K160S, K160E, K160K, K160N, K160F, K160Q, K161T, K161K, K161R, K1611, K161A, K161N, K161Q, K161S, K161T, A162D, A162Q, R162H, R162P, A162S, A162A, A162N, A162M, A162K, Q163G, Q163S, Q163Q, Q163A, Q163H, Q163N, Q163R, S164F, S164S, S164Q, S164I, S164R, S164Y, S165S, S165P, S165Q, S165A, S165D, S165I, S165T, S165Y, T166T, T166Q, T166E, T166S, T166D, T166K, T166I, T166N, T166P, T166R, D167S D167D, D1671, D167G, D167T, D167A and/or D167N mutation in a TadA reference sequence (e.g., TadA*7.10,ecTadA, or TadA8e), and any alternative mutation at the corresponding position, or one or more corresponding mutations in another adenosine deaminase. Additional mutations are described in U.S. Patent Application Publication No. 2022/0307003 A1 U.S. Pat. No. 11,155,803, and International Patent Application Publications No. WO 2023/288304 A2, PCT/CN2022/143408, WO 2018/027078 A1, WO 2021/158921 A1 and WO 2023/034959 A2, the disclosures of which are incorporated herein by reference in their entirety for all purposes.

[0386] In some embodiments, the disclosure provides TadA variants comprising a V82T, Y147T, and/or a Q154S mutation. In some embodiments, the disclosure provides TadA variants comprising a V82T, Y147T, and/or a Q154S mutation. In some embodiments, the disclosure provides TadA*8.8 further comprising a V82T mutation. In some embodiments, the disclosure provides TadA*8.8 further comprising a V82T, a Y147T, and a Q154S mutation. In some embodiments, the disclosure provides TadA*8.17 further comprising a V82T mutation. In some embodiments, the disclosure provides TadA*8.17 further comprising a V82T, a Y147T, and a Q154S mutation. In some embodiments, the disclosure provides TadA*8.20 further comprising a V82T mutation. In some embodiments, the disclosure provides TadA*8.20 further comprising a V82T, a Y147T, and a Q154S mutation.

[0387] In embodiments, a variant of TadA*7.10 comprises one or more alterations selected from any of those alterations provided herein.

[0388] In particular embodiments, an adenosine deaminase heterodimer comprises a TadA*8 domain and an adenosine deaminase domain selected from Staphylococcus aureus (S. aureus) TadA, Bacillus subtilis (B. subtilis) TadA, Salmonella typhimurium (S. typhimurium) TadA, Shewanella putrefaciens (S. putrefaciens) TadA, Haemophilus influenzae F3031 (H. influenzae) TadA, Caulobacter crescentus (C. crescentus) TadA, Geobacter sulfurreducens (G. sulfurreducens) TadA, or TadA*7.10.

[0389] In some embodiments, the TadA*8 is a variant as shown in Table 5D. Table 5D shows certain amino acid position numbers in the TadA amino acid sequence and the amino acids present in those positions in the TadA-7.10 adenosine deaminase. Table 5D also shows amino acid changes in TadA variants relative to TadA-7.10 following phage-assisted non-continuous evolution (PANCE) and phage-assisted continuous evolution (PACE), as described in M. Richter et al., 2020, Nature Biotechnology, doi.org/10.1038/s41587-020-0453-z, the entire contents of which are incorporated by reference herein. In some embodiments, the TadA*8 is TadA*8a, TadA*8b, TadA*8c, TadA*8d, or TadA*8e. In some embodiments, the TadA*8 is TadA*8e. In one embodiment, an adenosine deaminase is a TadA*8 that comprises or consists essentially of SEQ ID NO: 316 or a fragment thereof having adenosine deaminase activity

TABLE 5D
Select TadA*8 Variants

| | | TadA amino acid number | | | | | | | | | |
|---|---|---|---|---|---|---|---|---|---|---|---|
| | TadA | 26 | 88 | 109 | 111 | 119 | 122 | 147 | 149 | 166 | 167 |
| | TadA-7.10 | R | V | A | T | D | H | Y | F | T | D |
| PANCE 1 | | | | | R | | | | | | |
| PANCE 2 | | | | S/T | R | | | | | | |
| PACE | TadA-8a | C | | S | R | N | N | D | Y | I | N |
| | TadA-8b | | A | S | R | N | N | | Y | I | N |
| | TadA-8c | C | | S | R | N | N | | Y | I | N |
| | TadA-8d | | A | | R | N | | | Y | | |
| | TadA-8e | | | S | R | N | N | D | Y | I | N |

[0390] In some embodiments, the TadA variant is a variant as shown in Table 5E. Table 5E shows certain amino acid position numbers in the TadA amino acid sequence and the amino acids present in those positions in the TadA*7.10 adenosine deaminase. In some embodiments, the TadA variant is MSP605, MSP680, MSP823, MSP824, MSP825, MSP827, MSP828, or MSP829. In some embodiments, the TadA variant is MSP828. In some embodiments, the TadA variant is MSP829.

TABLE 5E
TadA Variants

| | TadA Amino Acid Number | | | | | | | |
|---|---|---|---|---|---|---|---|---|
| Variant | 36 | 76 | 82 | 147 | 149 | 154 | 157 | 167 |
| TadA-7.10 | L | I | V | Y | F | Q | N | D |
| MSP605 | | | G | T | | S | | |
| MSP680 | | Y | G | T | | S | | |
| MSP823 | H | | G | T | | S | K | |
| MSP824 | | | G | D | Y | S | | N |
| MSP825 | H | | G | D | Y | S | K | N |
| MSP827 | H | Y | G | T | | S | K | |
| MSP828 | | Y | G | D | Y | S | | N |
| MSP829 | H | Y | G | D | Y | S | K | N |

[0391] In particular embodiments, the fusion proteins or complexes comprise a single (e.g., provided as a monomer) TadA* (e.g., TadA*8 or TadA*9). Throughout the present disclosure, an adenosine deaminse base editor that comprises a single TadA* domain is indicates using the terminology ABEm or ABE #m, where “#” is an identifying number (e.g., ABE8.20m), where “m” indicates “monomer.” In some embodiments, the TadA* is linked to a Cas9 nickase. In some embodiments, the fusion proteins or complexes of the disclosure comprise as a heterodimer of a wild-type TadA (TadA(wt)) linked to a TadA*. Throughout the present disclosure, an adenosine deaminase base editor that comprises a single TadA* domain and a TadA(wt) domain is indicates using the terminology ABEd or ABE #d, where “#” is an identifying number (e.g., ABE8.20d), where “d” indicates “dimer.” In other embodiments, the fusion proteins or complexes of the disclosure comprise as a heterodimer of a TadA*7.10 linked to a TadA*. In some embodiments, the base editor is ABE8 comprising a TadA* variant monomer. In some embodiments, the base editor is ABE comprising a heterodimer of a TadA* and a TadA(wt). In some embodiments, the base editor is ABE comprising a heterodimer of a TadA* and TadA*7.10. In some embodiments, the base editor is ABE comprising a heterodimer of a TadA*. In some embodiments, the TadA* is selected from Tables 5A-5E.

[0392] In some embodiments, the adenosine deaminase is expressed as a monomer. In other embodiments, the adenosine deaminase is expressed as a heterodimer. In some embodiments, the deaminase or other polypeptide sequence lacks a methionine, for example when included as a component of a fusion protein. This can alter the numbering of positions. However, the skilled person will understand that such corresponding mutations refer to the same mutation.

[0393] Any of the mutations provided herein and any additional mutations (e.g., based on the ecTadA amino acid sequence) can be introduced into any other adenosine deaminases. Any of the mutations provided herein can be made individually or in any combination in a TadA reference sequence or another adenosine deaminase (e.g., ecTadA).

[0394] Details of A to G nucleobase editing proteins are described in International PCT Application No. PCT/US2017/045381 (WO2018/027078) and Gaudelli, N. M., et al., “Programmable base editing of A·T to G·C in genomic DNA without DNA cleavage” Nature, 551, 464-471 (2017), the entire contents of which are hereby incorporated by reference.

### C to T Editing

[0395] In some embodiments, a base editor disclosed herein comprises a fusion protein or complex comprising cytidine deaminase capable of deaminating a target cytidine (C) base of a polynucleotide to produce uridine (U), which has the base pairing properties of thymine. In some embodiments, for example where the polynucleotide is double-stranded (e.g., DNA), the uridine base can then be substituted with a thymidine base (e.g., by cellular repair machinery) to give rise to a C:G to a T:A transition. In other embodiments, deamination of a C to U in a nucleic acid by a base editor cannot be accompanied by substitution of the U to a T.

[0396] The deamination of a target C in a polynucleotide to give rise to a U is a non-limiting example of a type of base editing that can be executed by a base editor described herein. In another example, a base editor comprising a cytidine deaminase domain can mediate conversion of a cytosine (C) base to a guanine (G) base. For example, a U of a polynucleotide produced by deamination of a cytidine by a cytidine deaminase domain of a base editor can be excised from the polynucleotide by a base excision repair mechanism (e.g., by a uracil DNA glycosylase (UDG) domain), producing an abasic site. The nucleobase opposite the abasic site can then be substituted (e.g., by base repair machinery) with another base, such as a C, by for example a translesion polymerase. Although it is typical for a nucleobase opposite an abasic site to be replaced with a C, other substitutions (e.g., A, G or T) can also occur.

[0397] Accordingly, in some embodiments a base editor described herein comprises a deamination domain (e.g., cytidine deaminase domain) capable of deaminating a target C to a U in a polynucleotide. Further, as described below, the base editor may comprise additional domains which facilitate conversion of the U resulting from deamination to, in some embodiments, a T or a G. For example, a base editor comprising a cytidine deaminase domain can further comprise a uracil glycosylase inhibitor (UGI) domain to mediate substitution of a U by a T, completing a C-to-T base editing event. In another example, the base editor may comprise a uracil stabilizing protein as described herein. In another example, a base editor can incorporate a translesion polymerase to improve the efficiency of C-to-G base editing, since a translesion polymerase can facilitate incorporation of a C opposite an abasic site (i.e., resulting in incorporation of a G at the abasic site, completing the C-to-G base editing event).

[0398] A base editor comprising a cytidine deaminase as a domain can deaminate a target C in any polynucleotide, including DNA, RNA and DNA-RNA hybrids.

[0399] In some embodiments, a cytidine deaminase of a base editor comprises all or a portion (e.g., a functional portion) of an apolipoprotein B mRNA editing complex (APOBEC) family deaminase. APOBEC is a family of evolutionarily conserved cytidine deaminases. Members of this family are C-to-U editing enzymes. The N-terminal domain of APOBEC like proteins is the catalytic domain, while the C-terminal domain is a pseudocatalytic domain. More specifically, the catalytic domain is a zinc dependent cytidine deaminase domain and is important for cytidine deamination. APOBEC family members include APOBEC1, APOBEC2, APOBEC3A, APOBEC3B, APOBEC3C, APOBEC3D (“APOBEC3E” now refers to this), APOBEC3F, APOBEC3G, APOBEC3H, APOBEC4, and Activation-induced (cytidine) deaminase.

[0400] Other exemplary deaminases that can be fused to Cas9 according to aspects of this disclosure are provided below. In embodiments, the deaminases are activation-induced deaminases (AID). It should be understood that, in some embodiments, the active domain of the respective sequence can be used, e.g., the domain without a localizing signal (nuclear localization sequence, without nuclear export signal, cytoplasmic localizing signal).

[0401] Some aspects of the present disclosure are based on the recognition that modulating the deaminase domain catalytic activity of any of the fusion proteins or complexes described herein, for example by making point mutations in the deaminase domain, affect the processivity of the fusion proteins (e.g., base editors) or complexes. For example, mutations that reduce, but do not eliminate, the catalytic activity of a deaminase domain within a base editing fusion protein or complexes can make it less likely that the deaminase domain will catalyze the deamination of a residue adjacent to a target residue, thereby narrowing the deamination window. The ability to narrow the deamination window can prevent unwanted deamination of residues adjacent to specific target residues, which can reduce or prevent off-target effects.

[0402] In some embodiments, an APOBEC deaminase incorporated into a base editor may comprise one or more mutations selected from the group consisting of H121R, H122R, R126A, R126E, R118A, W90A, W90Y, and R132E of rAPOBEC1; D316R, D317R, R320A, R320E, R313A, W285A, W285Y, and R326E of hAPOBEC3G; and any alternative mutation at the corresponding position, or one or more corresponding mutations in another APOBEC deaminase.

[0403] A number of modified cytidine deaminases are commercially available, including, but not limited to, SaBE3, SaKKH-BE3, VQR-BE3, EQR-BE3, VRER-BE3, YE1-BE3, EE-BE3, YE2-BE3, and YEE-BE3, which are available from Addgene (plasmids 85169, 85170, 85171, 85172, 85173, 85174, 85175, 85176, 85177). In some embodiments, a deaminase incorporated into a base editor comprises all or a portion (e.g., a functional portion) of an APOBEC1 deaminase.

[0404] In some embodiments, the fusion proteins or complexes of the disclosure comprise one or more cytidine deaminase domains. In some embodiments, the cytidine deaminases provided herein are capable of deaminating cytosine or 5-methylcytosine to uracil or thymine. In some embodiments, the cytidine deaminases provided herein are capable of deaminating cytosine in DNA. The cytidine deaminase may be derived from any suitable organism. In some embodiments, the cytidine deaminase is a naturally-occurring cytidine deaminase that includes one or more mutations corresponding to any of the mutations provided herein. One of skill in the art will be able to identify the corresponding residue in any homologous protein, e.g., by sequence alignment and determination of homologous residues. Accordingly, one of skill in the art would be able to generate mutations in any naturally-occurring cytidine deaminase that corresponds to any of the mutations described herein. In some embodiments, the cytidine deaminase is from a prokaryote. In some embodiments, the cytidine deaminase is from a bacterium. In some embodiments, the cytidine deaminase is from a mammal (e.g., human).

[0405] In some embodiments, the cytidine deaminase comprises an amino acid sequence that is at least 60%, at least 65%, at least 70%, at least 75%, at least 80%, at least 85%, at least 90%, at least 95%, at least 96%, at least 97%, at least 98%, at least 99%, or at least 99.5% identical to any one of the cytidine deaminase amino acid sequences set forth herein. It should be appreciated that cytidine deaminases provided herein may include one or more mutations (e.g., any of the mutations provided herein). Some embodiments provide a polynucleotide molecule encoding the cytidine deaminase nucleobase editor polypeptide of any previous aspect or as delineated herein. In some embodiments, the polynucleotide is codon optimized.

[0406] In embodiments, a fusion protein of the disclosure comprises two or more nucleic acid editing domains.

[0407] Details of C to T nucleobase editing proteins are described in International PCT Application No. PCT/US2016/058344 (WO2017/070632) and Komor, A. C., et al., “Programmable editing of a target base in genomic DNA without double-stranded DNA cleavage” Nature 533, 420-424 (2016), the entire contents of which are hereby incorporated by reference.

### Cytidine Adenosine Base Editors (CABEs)

[0408] In some embodiments, a base editor described herein comprises an adenosine deaminase variant that has increased cytidine deaminase activity. Such base editors may be referred to as “cytidine adenosine base editors (CABEs)” or “cytosine base editors derived from TadA* (CBE-Ts),” and their corresponding deaminase domains may be referred to as “TadA* acting on DNA cytosine (TADC)” domains. In some instances, an adenosine deaminase variant has both adenine and cytosine deaminase activity (i.e., is a dual deaminase). In some embodiments, the adenosine deaminase variants deaminate adenine and cytosine in DNA. In some embodiments, the adenosine deaminase variants deaminate adenine and cytosine in single-stranded DNA. In some embodiments, the adenosine deaminase variants deaminate adenine and cytosine in RNA. In some embodiments, the adenosine deaminase variant predominantly deaminates cytosine in DNA and/or RNA (e.g., greater than 30%, 40%, 50%, 60%, 70%, 80%, 90%, 95%, or 99% of all deaminations catalyzed by the adenosine deaminase variant, or the number of cytosine deaminations catalyzed by the variant is about or at least about 2-fold, 3-fold, 4-fold, 5-fold, 6-fold, 7-fold, 8-fold, 9-fold, 10-fold, 25-fold, 50-fold, 75-fold, 100-fold, 500-fold, or 1,000-fold greater than the number adenine deaminations catalyzed by the variant). In some embodiments, the adenosine deaminase variant has approximately equal cytosine and adenosine deaminase activity (e.g., the two activities are within about 10% or 20% of each other). In some embodiments, the adenosine deaminase variant has predominantly cytosine deaminase activity, and little, if any, adenosine deaminase activity. In some embodiments, the adenosine deaminase variant has cytosine deaminase activity, and no significant or no detectable adenosine deaminase activity. In some embodiments, the target polynucleotide is present in a cell in vitro or in vivo. In some embodiments, the cell is a bacteria, yeast, fungi, insect, plant, or mammalian cell.

[0409] In some embodiments, the CABE comprises a bacterial TadA deaminase variant (e.g., ecTadA). In some embodiments, the CABE comprises a truncated TadA deaminase variant. In some embodiments, the CABE comprises a fragment of a TadA deaminase variant. In some embodiments, the CABE comprises a TadA*8.20 variant.

[0410] In some embodiments, an adenosine deaminase variant of the disclosure is a TadA adenosine deaminase comprising one or more alterations that increase cytosine deaminase activity (e.g., at least about 10-fold, 20-fold, 30-fold, 40-fold, 50-fold, 60-fold, 70-fold or more increase) while maintaining adenosine deaminase activity (e.g., at least about 30%, 40%, 50% or more of the activity of a reference adenosine deaminase (e.g., TadA*8.20 or TadA*8.19)). In some instances, the adenosine deaminase variant comprises one or more alterations that increase cytosine deaminase activity (e.g., at least about 10-fold, 20-fold, 30-fold, 40-fold, 50-fold, 60-fold, 70-fold or more increase) relative to the activity of a reference adenosine deaminase and comprise undetectable adenosine deaminase activity or adenosine deaminase activity that is less than 30%, 20%, 10%, or 5% of that of a reference adenosine deaminase. In some embodiments, the reference adenosine deaminase is TadA*8.20 or TadA*8.19.

[0411] In some embodiments, the adenosine deaminase variant is an adenosine deaminase comprising two or more alterations at an amino acid position selected from the group consisting of 2, 4, 6, 8, 13, 17, 23, 27, 29, 30, 47, 48, 49, 67, 76, 77, 82, 84, 96, 100, 107, 112, 114, 115, 118, 119, 122, 127, 142, 143, 147, 149, 158, 159, 162 165, 166, and 167, of an amino acid sequence having at least about 70%, 75%, 80%, 85%, 90%, 95%, 98%, 99% or greater identity to SEQ ID NO: 1, or a corresponding alteration in another deaminase. I

[0412] In some embodiments, the adenosine deaminase variant is an adenosine deaminase comprising one or more alterations selected from the group consisting of S2H, V4K, V4S, V4T, V4Y, F6G, F6H, F6Y, H8Q, R13G, T17A, T17W, R23Q, E27C, E27G, E27H, E27K, E27Q, E27S, E27G, P29A, P29G, P29K, V30F, V30I, R47G, R47S, A48G, I49K, I49M, I49N, I49Q, I49T, G67W, I76H, I76R, I76W, Y76H, Y76R, Y76W, F84A, F84M, H96N, G100A, G100K, T111H, G112H, A114C, G115M, M118L, H122G, H122R, H122T, N127I, N127K, N127P, A142E, R147H, A158V, Q159S, A162C, A162N, A162Q, and S165P of an amino acid sequence having at least about 70%, 75%, 80%, 85%, 90%, 95%, 98%, 99% or greater identity to SEQ ID NO: 1, or a corresponding alteration in another deaminase.

[0413] In some embodiments, the adenosine deaminase variant is an adenosine deaminase comprising an amino acid alteration or combination of amino acid alterations selected from those listed in any of Tables 6A-6F.

[0414] The residue identity of exemplary adenosine deaminase variants that are capable of deaminating adenine and/or cytidine in a target polynucleotide (e.g., DNA) is provided in Tables 6A-6F below. Further examples of adenosine deaminase variants include the following variants of 1.17 (see Table 6A): 1.17+E27H; 1.17+E27K; 1.17+E27S; 1.17+E27S+I49K; 1.17+E27G; 1.17+149N; 1.17+E27G+I49N; and 1.17+E27Q. In some embodiments, any of the amino acid alterations provided herein are substituted with a conservative amino acid. Additional mutations known in the art can be further added to any of the adenosine deaminase variants provided herein.

[0415] In some embodiments, the base editor systems comprising a CABE provided herein have at least about a 30%, 40%, 50%, 60%, 70% or more C to T editing activity in a target polynucleotide (e.g., DNA). In some embodiments, a base editor system comprising a CABE as provided herein has an increased C to T base editing activity (e.g., increased at least about 30-fold, 40-fold, 50-fold, 60-fold, 70-fold or more) relative to a reference base editor system comprising a reference adenosine deaminase (e.g., TadA*8.20 or TadA*8.19).

TABLE 6A
Adenosine Deaminase Variants. Mutations are indicated with reference to TadA*8.20.
“S” indicates “Surface,” and “NAS” indicates “Near Active Site.”
Adenosine Deaminase Variants. Mutations are indicated with reference to TadA*8.20.
“S” indicates “Surface,” and “NAS” indicates “Near Active Site.”

| | location in structure | | | | | | | | | | |
|---|---|---|---|---|---|---|---|---|---|---|---|
| | N/A | S h1 | S h1 | S h1 | NAS | NAS | NAS | NAS | | S | |
| | Amino Acid No. | | | | | | | | | | |
| | (*START Met is AA#1) | | | | | | | | | | |
| | 2 | 8 | 13 | 17 | 27 | 47 | 48 | 49 | 67 | 76 | 77 |
| TadA*8.20 | S | H | R | T | E | R | A | I | G | Y | D |
| TadA*8.19 | | | | | | | | | | I | |
| 1.1 | | | | | H | | | | | I | |
| 1.2 | | | | | H | | | K | | I | |
| 1.3 | | | | | S | | | K | | I | |
| 1.4 | | | | | S | | | K | | I | |
| 1.5 | | | | | K | | | | | | |
| 1.6 | | | | | K | | | | | | |
| 1.7 | | | | | H | | | | | I | |
| 1.8 | | | | | S | | | K | W | | |
| 1.9 | | | | | | | | T | W | | |
| 1.10 | | | | | C | | | | | I | |
| 1.11 | | | G | | Q | | | | | | |
| 1.12 | | | | A | H | | | M | | I | |
| 1.13 | | | | | | | | Q | | I | |
| TadA*8.20 | S | H | R | T | E | R | A | I | G | Y | D |
| TadA*8.19 | | | | | | | | | | I | |
| 1.14 | H | | | | | | | K | | I | |
| 1.15 | | | | | | S | | | | | |
| 1.16 | | Q | | | | | | Q | | I | |
| 1.17 | | | | A | | | G | | | | |
| 1.18 | | | | | G | | | | | | |
| 1.19 | | | | | G | | | N | | | |
| 1.20 | | | | | G | | | | | | G |

Adenosine Deaminase Variants. Mutations are indicated with reference to TadA*8.20.
“I” indicates “Internal,” “S” indicates “Surface,” and “NAS” indicates “Near Active Site.”

| | location in structure | | | | | | | | | | | |
|---|---|---|---|---|---|---|---|---|---|---|---|---|
| | I | NAS | | NAS | S | | S | S | S | | S | |
| | Amino Acid No. | | | | | | | | | | | |
| | (*START Met is AA# 1) | | | | | | | | | | | |
| | 82 | 84 | 96 | 107 | 112 | 115 | 118 | 119 | 127 | 142 | 162 | 165 |
| TadA*8.20 | S | F | H | R | G | G | M | D | N | A | A | S |
| TadA*8.19 | | | | | | | | | | | | |
| 1.1 | | M | | | | | | | | | | |
| 1.2 | | | | | | | | | | | | |
| 1.3 | | | | | | | | | | | | |
| 1.4 | | | | | | | | | | | N | |
| 1.5 | | | | | | | | | | | | |
| 1.6 | | | | | | | | N | | | | |
| 1.7 | | | | | | | | | | | | |
| 1.8 | | | | | | | | | | | | |
| 1.9 | | | N | | | | | | | | | |
| 1.10 | | | | | | | | N | | | | |
| 1.11 | | | | | | | | | K | | | |
| 1.12 | | | | | | | L | | | | | |
| 1.13 | | | | | | M | | | | | | |
| 1.14 | | | | | H | | | | | | | |
| 1.15 | | | | C | | | | | | | | |
| 1.16 | | | | | | | | | | | | |
| 1.17 | T | | | | | | | | | E | | |
| 1.18 | | | | | | | | | | | | |
| 1.19 | | | | | | | | | | | | |
| 1.20 | | | | | | | | | | | | P |

TABLE 6B
Adenosine deaminase variants. Mutations are
indicated with reference to TadA*8.20.

| | Position No. | | | | | | | | | |
|---|---|---|---|---|---|---|---|---|---|---|
| | 27 | 29 | 30 | 49 | 82 | 84 | 107 | 112 | 115 | 142 |
| | TadA*8.20 | | | | | | | | | |
| | E | P | V | I | S | F | R | G | G | A |
| | Alterations Evaluated | | | | | | | | | |
| | G/S/H | G/A/K | I/L/F | K | T | L/A | C | H | M | E |
| S1.1 | S | | | K | T | | | | | |
| S1.2 | S | | | K | T | | C | | | |
| S1.3 | S | | | K | T | | | H | | |
| S1.4 | S | | | K | T | | | | M | |
| S1.5 | S | | | K | T | | | | | E |
| S1.6 | S | | | K | T | | C | H | | |
| S1.7 | S | | | K | T | | C | | M | |
| S1.8 | S | | | K | T | | C | | | E |
| S1.9 | S | | | K | T | | | H | | E |
| S1.10 | S | | | K | T | | | | M | E |
| S1.11 | S | | | K | T | | C | H | M | E |
| S1.12 | S | | I | K | T | | | | | |
| S1.13 | S | | I | K | T | | C | | | |
| S1.14 | S | | I | K | T | | | H | | |
| S1.15 | S | | I | K | T | | | | M | |
| S1.16 | S | | I | K | T | | | | | E |
| S1.17 | S | | I | K | T | | C | H | | |
| S1.18 | S | | I | K | T | | C | | M | |
| S1.19 | S | | I | K | T | | C | | | E |
| S1.20 | S | | I | K | T | | | H | | E |
| S1.21 | S | | I | K | T | | | | M | E |
| S1.22 | S | | I | K | T | | C | H | M | E |
| S1.23 | S | | L | K | T | | | | | |
| S1.24 | S | | L | K | T | | C | | | |
| S1.25 | S | | L | K | T | | | H | | |
| S1.26 | S | | L | K | T | | | | M | |
| S1.27 | S | | L | K | T | | | | | E |
| S1.28 | S | | L | K | T | | C | H | | |
| S1.29 | S | | L | K | T | | C | | M | |
| S1.30 | S | | L | K | T | | C | | | E |
| S1.31 | S | | L | K | T | | | H | | E |
| S1.32 | S | | L | K | T | | | | M | E |
| S1.33 | S | | L | K | T | | C | H | M | E |
| S1.34 | S | | F | K | T | A | | | | |
| S1.35 | S | | F | K | T | A | C | | | |
| S1.36 | S | | F | K | T | A | | H | | |
| S1.37 | S | | F | K | T | A | | | M | |
| S1.38 | S | | F | K | T | A | | | | E |
| S1.39 | S | | F | K | T | A | C | H | | |
| S1.40 | S | | F | K | T | A | C | | M | |
| S1.41 | S | | F | K | T | A | C | | | E |
| S1.42 | S | | F | K | T | A | | H | | E |
| S1.43 | S | | F | K | T | A | | | M | E |
| S1.44 | S | | F | K | T | A | C | H | M | E |
| S1.45 | S | | | K | T | L | | | | |
| S1.46 | S | | | K | T | L | C | | | |
| S1.47 | S | | | K | T | L | | H | | |
| S1.48 | S | | | K | T | L | | | M | |
| S1.49 | S | | | K | T | L | | | | E |
| S1.50 | S | | | K | T | L | C | H | | |
| S1.51 | S | | | K | T | L | C | | M | |
| S1.52 | S | | | K | T | L | C | | | E |
| S1.53 | S | | | K | T | L | | H | | E |
| S1.54 | S | | | K | T | L | | | M | E |
| S1.55 | S | | | K | T | L | C | H | M | E |
| S1.56 | S | | I | K | T | L | | | | |
| S1.57 | S | | I | K | T | L | C | | | |
| S1.58 | S | | I | K | T | L | | H | | |
| S1.59 | S | | I | K | T | L | | | M | |
| S1.60 | S | | I | K | T | L | | | | E |
| S1.61 | S | | I | K | T | L | C | H | | |
| S1.62 | S | | I | K | T | L | C | | M | |
| S1.63 | S | | I | K | T | L | C | | | E |
| S1.64 | S | | I | K | T | L | | H | | E |
| S1.65 | S | | I | K | T | L | | | M | E |
| S1.66 | S | | I | K | T | L | C | H | M | E |
| S1.67 | S | G | | K | T | | | | | |
| S1.68 | S | G | | K | T | | C | | | |
| S1.69 | S | G | | K | T | | | H | | |
| S1.70 | S | G | | K | T | | | | M | |
| S1.71 | S | G | | K | T | | | | | E |
| S1.72 | S | G | | K | T | | C | H | | |
| S1.73 | S | G | | K | T | | C | | M | |
| S1.74 | S | G | | K | T | | C | | | E |
| S1.75 | S | G | | K | T | | | H | | E |
| S1.76 | S | G | | K | T | | | | M | E |
| S1.77 | S | G | | K | T | | C | H | M | E |
| S1.78 | | G | | K | T | | | | | |
| S1.79 | | G | | K | T | | C | | | |
| S1.80 | | G | | K | T | | | H | | |
| S1.81 | | G | | K | T | | | | M | |
| S1.82 | | G | | K | T | | | | | E |
| S1.83 | | G | | K | T | | C | H | | |
| S1.84 | | G | | K | T | | C | | M | |
| S1.85 | | G | | K | T | | C | | | E |
| S1.86 | | G | | K | T | | | H | | E |
| S1.87 | | G | | K | T | | | | M | E |
| S1.88 | | G | | K | T | | C | H | M | E |
| S1.89 | | K | | K | T | | | | | |
| S1.90 | | K | | K | T | | C | | | |
| S1.91 | | K | | K | T | | | H | | |
| S1.92 | | K | | K | T | | | | M | |
| S1.93 | | K | | K | T | | | | | E |
| S1.94 | | K | | K | T | | C | H | | |
| S1.95 | | K | | K | T | | C | | M | |
| S1.96 | | K | | K | T | | C | | | E |
| S1.97 | | K | | K | T | | | H | | E |
| S1.98 | | K | | K | T | | | | M | E |
| S1.99 | | K | | K | T | | C | H | M | E |
| S1.100 | | K | I | K | T | | | | | |
| S1.101 | | K | I | K | T | | C | | | |
| S1.102 | | K | I | K | T | | | H | | |
| S1.103 | | K | I | K | T | | | | M | |
| S1.104 | | K | I | K | T | | | | | E |
| S1.105 | | K | I | K | T | | C | H | | |
| S1.106 | | K | I | K | T | | C | | M | |
| S1.107 | | K | I | K | T | | C | | | E |
| S1.108 | | K | I | K | T | | | H | | E |
| S1.109 | | K | I | K | T | | | | M | E |
| S1.110 | | K | I | K | T | | C | H | M | E |
| S1.111 | | K | | K | T | L | | | | |
| S1.112 | | K | | K | T | L | C | | | |
| S1.113 | | K | | K | T | L | | H | | |
| S1.114 | | K | | K | T | L | | | M | |
| S1.115 | | K | | K | T | L | | | | E |
| S1.116 | | K | | K | T | L | C | H | | |
| S1.117 | | K | | K | T | L | C | | M | |
| S1.118 | | K | | K | T | L | C | | | E |
| S1.119 | | K | | K | T | L | | H | | E |
| S1.120 | | K | | K | T | L | | | M | E |
| S1.121 | | K | | K | T | L | C | H | M | E |
| S1.122 | | K | I | K | T | L | | | | |
| S1.123 | | K | I | K | T | L | C | | | |
| S1.124 | | K | I | K | T | L | | H | | |
| S1.125 | | K | I | K | T | L | | | M | |
| S1.126 | | K | I | K | T | L | | | | E |
| S1.127 | | K | I | K | T | L | C | H | | |
| S1.128 | | K | I | K | T | L | C | | M | |
| S1.129 | | K | I | K | T | L | C | | | E |
| S1.130 | | K | I | K | T | L | | H | | E |
| S1.131 | | K | I | K | T | L | | | M | E |
| S1.132 | | K | I | K | T | L | C | H | M | E |
| S1.133 | G | | | K | T | | | | | |
| S1.134 | G | | | K | T | | C | | | |
| S1.135 | G | | | K | T | | | H | | |
| S1.136 | G | | | K | T | | | | M | |
| S1.137 | G | | | K | T | | | | | E |
| S1.138 | G | | | K | T | | C | H | | |
| S1.139 | G | | | K | T | | C | | M | |
| S1.140 | G | | | K | T | | C | | | E |
| S1.141 | G | | | K | T | | | H | | E |
| S1.142 | G | | | K | T | | | | M | E |
| S1.143 | G | | | K | T | | C | H | M | E |
| S1.144 | H | | | K | T | | | | | |
| S1.145 | H | | | K | T | | C | | | |
| S1.146 | H | | | K | T | | | H | | |
| S1.147 | H | | | K | T | | | | M | |
| S1.148 | H | | | K | T | | | | | E |
| S1.149 | H | | | K | T | | C | H | | |
| S1.150 | H | | | K | T | | C | | M | |
| S1.151 | H | | | K | T | | C | | | E |
| S1.152 | H | | | K | T | | | H | | E |
| S1.153 | H | | | K | T | | | | M | E |
| S1.154 | H | | | K | T | | C | H | M | E |
| S1.155 | S | | | | T | | | | | |
| S1.156 | S | | | | T | | C | | | |
| S1.157 | S | | | | T | | | H | | |
| S1.158 | S | | | | T | | | | M | |
| S1.159 | S | | | | T | | | | | E |
| S1.160 | S | | | | T | | C | H | | |
| S1.161 | S | | | | T | | C | | M | |
| S1.162 | S | | | | T | | C | | | E |
| S1.163 | S | | | | T | | | H | | E |
| S1.164 | S | | | | T | | | | M | E |
| S1.165 | S | | | | T | | C | H | M | E |
| S1.166 | | A | | | T | | | | | |
| S1.167 | | A | | | T | | C | | | |
| S1.168 | | A | | | T | | | H | | |
| S1.169 | | A | | | T | | | | M | |
| S1.170 | | A | | | T | | | | | E |
| S1.171 | | A | | | T | | C | H | | |
| S1.172 | | A | | | T | | C | | M | |
| S1.173 | | A | | | T | | C | | | E |
| S1.174 | | A | | | T | | | H | | E |
| S1.175 | | A | | | T | | | | M | E |
| S1.176 | | A | | | T | | C | H | M | E |
| S1.177 | S | | I | | T | | | | | |
| S1.178 | S | | I | | T | | C | | | |
| S1.179 | S | | I | | T | | | H | | |
| S1.180 | S | | I | | T | | | | M | |
| S1.181 | S | | I | | T | | | | | E |
| S1.182 | S | | I | | T | | C | H | | |
| S1.183 | S | | I | | T | | C | | M | |
| S1.184 | S | | I | | T | | C | | | E |
| S1.185 | S | | I | | T | | | H | | E |
| S1.186 | S | | I | | T | | | | M | E |
| S1.187 | S | | I | | T | | C | H | M | E |
| S1.188 | | A | I | | T | L | | | | |
| S1.189 | | A | I | | T | L | C | | | |
| S1.190 | | A | I | | T | L | | H | | |
| S1.191 | | A | I | | T | L | | | M | |
| S1.192 | | A | I | | T | L | | | | E |
| S1.193 | | A | I | | T | L | C | H | | |
| S1.194 | | A | I | | T | L | C | | M | |
| S1.195 | | A | I | | T | L | C | | | E |
| S1.196 | | A | I | | T | L | | H | | E |
| S1.197 | | A | I | | T | L | | | M | E |
| S1.198 | | A | I | | T | L | C | H | M | E |
| S1.199 | S | A | L | K | T | L | C | H | M | E |

TABLE 6C
Adenosine deaminse variants. Mutations are indicated
with reference to variant 1.2 (Table 6A) .

| | Alternative | Residue identity | | | | | | | | |
|---|---|---|---|---|---|---|---|---|---|---|
| | Variant | (START Met is amino acid #1) | | | | | | | | |
| Variant Name | Names | 4 | 6 | 17 | 23 | 76 | 77 | 100 | 111 | 114 |
| Reference | 1.2 | V | F | T | R | I | D | G | T | A |
| | (see Table 6A) | | | | | | | | | |
| TadAC2.1 | pDKL-135; 2.1 | K | | | | | | | | C |
| TadAC2.2 | pDKL-136; 2.2 | K | | | | | G | | | |
| TadAC2.3 | pDKL-137; 2.3 | | Y | | | | | A | | |
| TadAC2.4 | pDKL-138; 2.4 | T | | | | R | | | | |
| TadAC2.5 | pDKL-139; 2.5 | | Y | | | W | | | | |
| TadAC2.6 | pDKL-140; 2.6 | | Y | | | | | | | |
| TadAC2.7 | pDKL-141; 2.7 | | Y | | | | | | | C |
| TadAC2.8 | pDKL-142; 2.8 | | Y | | | | | | | |
| TadAC2.9 | pDKL-143; 2.9 | K | | | | W | | | | |
| TadAC2.10 | pDKL-144; 2.10 | | G | | | R | | K | | |
| TadAC2.11 | pDKL-145; 2.11 | | H | | | | | | | |
| TadAC2.12 | pDKL-146; 2.12 | | | | | | | | | C |
| TadAC2.13 | pDKL-147; 2.13 | | Y | | | H | | | | |
| TadAC2.14 | pDKL-148; 2.14 | | | | | | | | | |
| TadAC2.15 | pDKL-149; 2.15 | | | | Q | R | | | | |
| TadAC2.16 | pDKL-150; 2.16 | | | | | H | | | | |
| TadAC2.17 | pDKL-151; 2.17 | | Y | | | | | | H | |
| TadAC2.18 | pDKL-152; 2.18 | | | | | W | | | | |
| TadAC2.19 | pDKL-153; 2.19 | | | | | | | | H | |
| TadAC2.20 | pDKL-154; 2.20 | | | | | | | | | |
| TadAC2.21 | pDKL-155; 2.21 | | Y | | | R | | | | |
| TadAC2.22 | pDKL-156; 2.22 | | | W | | H | | | | |
| TadAC2.23 | pDKL-157; 2.23 | S | | | | Y | | | | |
| TadAC2.24 | pDKL-158; 2.24 | | | | | | | | | |

| | Alternative | Residue identity | | | | | | | | |
|---|---|---|---|---|---|---|---|---|---|---|
| | Variant | (START Met is amino acid #1) | | | | | | | | |
| Variant Name | Names | 119 | 122 | 127 | 143 | 147 | 158 | 159 | 162 | 166 |
| Reference | 1.2 | D | H | N | A | R | A | Q | A | T |
| | (see Table 6A) | | | | | | | | | |
| TadAC2.1 | pDKL-135; 2.1 | | | | | | | | | |
| TadAC2.2 | pDKL-136; 2.2 | | | | | | | | | |
| Reference | 1.2 | D | H | N | A | R | A | Q | A | T |
| | (see Table 6A) | | | | | | | | | |
| TadAC2.3 | pDKL-137; 2.3 | | R | | | | | | | |
| TadAC2.4 | pDKL-138; 2.4 | | G | | | | | | | |
| TadAC2.5 | pDKL-139; 2.5 | | | | | | | | | |
| TadAC2.6 | pDKL-140; 2.6 | N | | | | | | | | |
| TadAC2.7 | pDKL-141; 2.7 | | | | | | | | | |
| TadAC2.8 | pDKL-142; 2.8 | | | | | | | | | |
| TadAC2.9 | pDKL-143; 2.9 | | T | | | | | | | |
| TadAC2.10 | pDKL-144; 2.10 | | | | | | | | | |
| TadAC2.11 | pDKL-145; 2.11 | | N | | | | | | | |
| TadAC2.12 | pDKL-146; 2.12 | | | | | | | | | |
| TadAC2.13 | pDKL-147; 2.13 | | R | | | | | | | I |
| TadAC2.14 | pDKL-148; 2.14 | | | P | | | | | | |
| TadAC2.15 | pDKL-149; 2.15 | | | | | | | | | |
| TadAC2.16 | pDKL-150; 2.16 | | R | | | | V | | | |
| TadAC2.17 | pDKL-151; 2.17 | | | | | | | | | |
| TadAC2.18 | pDKL-152; 2.18 | | | | | | | | | |
| TadAC2.19 | pDKL-153; 2.19 | | G | | | | | | C | |
| TadAC2.20 | pDKL-154; 2.20 | | | | E | | | | | |
| TadAC2.21 | pDKL-155; 2.21 | | | | | | | | | |
| TadAC2.22 | pDKL-156; 2.22 | | G | | | | V | | | |
| TadAC2.23 | pDKL-157; 2.23 | | | | E | | | S | | |
| TadAC2.24 | pDKL-158; 2.24 | | | I | | | | | Q | |

TABLE 6D
Adenosine deaminase variants. Mutations are indicated with reference to TadA*8.20.

| | AA Positions | | | | | | | | | | | | | | |
|---|---|---|---|---|---|---|---|---|---|---|---|---|---|---|---|
| | 6 | 27 | 49 | 76 | 77 | 82 | 107 | 112 | 114 | 115 | 119 | 122 | 127 | 142 | 143 |
| TadA*8.20 | F | E | I | Y | D | S | R | G | A | G | D | H | N | A | A |
| S1.154 | F | H | K | Y | D | T | C | H | | M | | | | E | |
| Alterations | Y | | | W | G | | | | C | | N | G | P | | E |
| from Table | | | | | | | | | | | | | | | |
| 6C | | | | | | | | | | | | | | | |
| S2.1 | Y | H | K | W | | T | C | H | | M | | | | E | |
| S2.2 | Y | H | K | | G | T | C | H | | M | | | | E | |
| S2.3 | Y | H | K | | | T | C | H | C | M | | | | E | |
| S2.4 | Y | H | K | | | T | C | H | | M | N | | | E | |
| TadA*8.20 | F | E | I | Y | D | S | R | G | A | G | D | H | N | A | A |
| S2.5 | Y | H | K | | | T | C | H | | M | | G | | E | |
| S2.6 | Y | H | K | | | T | C | H | | M | | | P | E | |
| S2.7 | Y | H | K | | | T | C | H | | M | | | | E | E |
| S2.8 | Y | H | K | | | T | C | H | | M | | | | A | E |
| S2.9 | Y | H | K | W | G | T | C | H | | M | | | | E | |
| S2.10 | Y | H | K | W | | T | C | H | C | M | | | | E | |
| S2.11 | Y | H | K | W | | T | C | H | | M | N | | | E | |
| S2.12 | Y | H | K | W | | T | C | H | | M | | G | | E | |
| S2.13 | Y | H | K | W | | T | C | H | | M | | | P | E | |
| S2.14 | Y | H | K | W | | T | C | H | | M | | | | E | E |
| S2.15 | Y | H | K | W | | T | C | H | | M | | | | A | E |
| S2.16 | Y | H | K | | G | T | C | H | C | M | | | | E | |
| S2.17 | Y | H | K | | G | T | C | H | | M | N | | | E | |
| S2.18 | Y | H | K | | G | T | C | H | | M | | G | | E | |
| S2.19 | Y | H | K | | G | T | C | H | | M | | | P | E | |
| S2.20 | Y | H | K | | G | T | C | H | | M | | | | E | E |
| S2.21 | Y | H | K | | G | T | C | H | | M | | | | A | E |
| S2.22 | Y | H | K | | | T | C | H | C | M | N | | | E | |
| S2.23 | Y | H | K | | | T | C | H | C | M | | G | | E | |
| S2.24 | Y | H | K | | | T | C | H | C | M | | | P | E | |
| S2.25 | Y | H | K | | | T | C | H | | M | N | G | | E | |
| S2.26 | Y | H | K | | | T | C | H | | M | N | | P | E | |
| S2.27 | Y | H | K | | | T | C | H | | M | | G | P | E | |
| S2.28 | Y | H | K | W | G | T | C | H | C | M | | | | E | |
| S2.29 | Y | H | K | W | G | T | C | H | | M | N | | | E | |
| S2.30 | Y | H | K | W | G | T | C | H | | M | | G | | E | |
| S2.31 | Y | H | K | W | G | T | C | H | | M | | | P | E | |
| S2.32 | Y | H | K | W | G | T | C | H | | M | | | | E | E |
| S2.33 | Y | H | K | W | G | T | C | H | | M | | | | A | E |
| S2.34 | Y | H | K | W | | T | C | H | C | M | N | | | E | |
| S2.35 | Y | H | K | W | | T | C | H | C | M | | G | | E | |
| S2.36 | Y | H | K | W | | T | C | H | C | M | | | P | E | |
| S2.37 | Y | H | K | W | | T | C | H | C | M | | | | E | E |
| S2.38 | Y | H | K | W | | T | C | H | C | M | | | | A | E |
| S2.39 | Y | H | K | W | | T | C | H | | M | N | G | | E | |
| S2.40 | Y | H | K | W | | T | C | H | | M | N | | P | E | |
| TadA*8.20 | F | E | I | Y | D | S | R | G | A | G | D | H | N | A | A |
| S2.41 | Y | H | K | W | | T | C | H | | M | | G | P | E | |
| S2.42 | Y | H | K | W | | T | C | H | C | M | N | G | | E | |
| S2.43 | Y | H | K | W | | T | C | H | C | M | N | | P | E | |
| S2.44 | Y | H | K | W | | T | C | H | C | M | | G | P | E | |
| S2.45 | Y | H | K | W | G | T | C | H | C | M | N | | | E | |
| S2.46 | Y | H | K | M | G | T | C | H | C | M | | G | | E | |
| S2.47 | Y | H | K | W | G | T | C | H | C | M | | | P | E | |
| S2.48 | Y | H | K | M | G | T | C | H | C | M | | | | E | E |
| S2.49 | Y | H | K | W | G | T | C | H | C | M | | | | A | E |
| S2.50 | Y | H | K | W | G | T | C | H | C | M | N | G | | E | |
| S2.51 | Y | H | K | M | G | T | C | H | C | M | N | | P | E | |
| S2.52 | Y | H | K | W | G | T | C | H | C | M | | G | P | E | |
| S2.53 | Y | H | K | W | | T | C | H | C | M | N | G | P | E | E |
| S2.54 | Y | H | K | W | | T | C | H | C | M | N | G | P | A | E |
| S2.55 | Y | H | K | W | G | T | C | H | C | M | N | G | P | E | E |
| S2.56 | Y | H | K | W | G | T | C | H | C | M | N | G | P | A | E |

TABLE 6E
Hybrid constructs. Mutations are indicated with reference to TadA*7.10.

| | TadA amino acid subsitutions | | | | | | | | | | | |
|---|---|---|---|---|---|---|---|---|---|---|---|---|
| | 76 | 82 | 109 | 111 | 119 | 122 | 123 | 147 | 149 | 154 | 166 | 167 |
| TadA*7.10 | I | V | A | T | D | H | Y | Y | F | Q | T | D |
| TadA*8e | | | S | R | N | N | | D | Y | | I | N |
| TadA*8.20 | Y | S | | | | | H | R | | R | | |
| TadA*8.17 | | S | | | | | | | | R | | |
| pNMG-B878 | Y | S | | | | | H | D | | R | | |
| pNMG-B879 | Y | S | | | | | H | R | Y | R | | |
| pNMG-B880 | Y | S | | | | | H | R | | R | I | |
| pNMG-B881 | Y | S | | | | | H | R | | R | | N |
| pNMG-B882 | Y | S | | | | | H | D | Y | R | I | N |
| pNMG-B883 | Y | S | | R | N | | H | R | | R | | |
| pNMG-B884 | Y | S | S | R | N | N | H | R | | R | | |
| pNMG-B885 | Y | S | S | | | | H | R | | R | | |
| pNMG-B886 | Y | S | | R | | | H | R | | R | | |
| pNMG-B887 | Y | S | | | N | | H | R | | R | | |
| pNMG-B888 | Y | S | | | | N | H | R | | R | | |
| pNMG-B889 | Y | S | S | R | | | H | R | | R | | |
| pNMG-B890 | Y | S | | | N | N | H | R | | R | | |
| pNMG-B891 | Y | S | S | R | N | N | H | D | Y | R | I | N |

TABLE 6F
Base editor variants. Mutations are indicated with reference to TadA*8.19/8.20.

| | AA positions: | | | | | | | | | | | | |
|---|---|---|---|---|---|---|---|---|---|---|---|---|---|
| | 17 | 27 | 48 | 49 | 76 | 82 | 84 | 118 | 142 | 147 | 149 | 166 | 167 |
| ABE8.19 m/ | T | E | A | I | Y/I | S | F | M | A | Y | F | T | D |
| 8.20 m | | | | | | | | | | | | | |
| 1.1 + | | H | | | I | | M | | | | Y | | |
| 8e(B879) | | | | | | | | | | | | | |
| 1.2 + | | H | | K | I | | | | | | Y | | |
| 8e(B879) | | | | | | | | | | | | | |
| 1.12 + | A | H | | M | I | | | L | | | Y | | |
| 8e(B879) | | | | | | | | | | | | | |
| 1.17 + | A | | G | | | T | | | E | | Y | | |
| 8e(B879) | | | | | | | | | | | | | |
| 1.18 + | | G | | | | | | | | | Y | | |
| 8e(B879) | | | | | | | | | | | | | |
| 1.19 + | | G | | N | | | | | | | Y | | |
| 8e(B879) | | | | | | | | | | | | | |
| 1.1 + | | H | | | I | | M | | | D | Y | I | N |
| 8e(B882) | | | | | | | | | | | | | |
| 1.2 + | | H | | K | I | | | | | D | Y | I | N |
| 8e(B882) | | | | | | | | | | | | | |
| 1.12 + | A | H | | M | I | | | L | | D | Y | I | N |
| 8e(B882) | | | | | | | | | | | | | |
| 1.17 + | A | | G | | | T | | | E | D | Y | I | N |
| 8e(B882) | | | | | | | | | | | | | |
| 1.18 + | | G | | | | | | | | D | Y | I | N |
| 8e(B882) | | | | | | | | | | | | | |
| 1.19 + | | G | | N | | | | | | D | Y | I | N |
| 8e(B882) | | | | | | | | | | | | | |

### Guide Polynucleotides

[0416] A polynucleotide programmable nucleotide binding domain, when in conjunction with a bound guide polynucleotide (e.g., gRNA), can specifically bind to a target polynucleotide sequence (i.e., via complementary base pairing between bases of the bound guide nucleic acid and bases of the target polynucleotide sequence) and thereby localize the base editor to the target nucleic acid sequence desired to be edited. In some embodiments, the target polynucleotide sequence comprises single-stranded DNA or double-stranded DNA. In some embodiments, the target polynucleotide sequence comprises RNA. In some embodiments, the target polynucleotide sequence comprises a DNA-RNA hybrid.

[0417] In an embodiment, a guide polynucleotide described herein can be RNA or DNA. In one embodiment, the guide polynucleotide is a gRNA.

[0418] In some embodiments, the guide polynucleotide is at least one single guide RNA (“sgRNA” or “gRNA”). In some embodiments, a guide polynucleotide comprises two or more individual polynucleotides, which can interact with one another via for example complementary base pairing (e.g., a dual guide polynucleotide, dual gRNA). For example, a guide polynucleotide may comprise a CRISPR RNA (crRNA) and a trans-activating CRISPR RNA (tracrRNA) or may comprise one or more trans-activating CRISPR RNA (tracrRNA).

[0419] A guide polynucleotide may include natural or non-natural (or unnatural) nucleotides (e.g., peptide nucleic acid or nucleotide analogs). In some cases, the targeting region of a guide nucleic acid sequence (e.g., a spacer) can be at least 15, 16, 17, 18, 19, 20, 21, 22, 23, 24, 25, 26, 27, 28, 29, or 30 nucleotides in length.

In some embodiments, the methods described herein can utilize an engineered Cas protein. A guide RNA (gRNA) is a short synthetic RNA composed of a scaffold sequence necessary for Cas-binding and a user-defined ˜20 nucleotide spacer that defines the genomic target to be modified. Exemplary gRNA scaffold sequences are provided in the sequence listing as SEQ ID NOs: 317-327 and 425. Thus, a skilled artisan can change the genomic target of the Cas protein specificity is partially determined by how specific the gRNA targeting sequence is for the genomic target compared to the rest of the genome. In embodiments, the spacer is about 10, 11, 12, 13, 14, 15, 16, 17, 18, 19, 20, 22, 23, 24, 25, or more nucleotides in length. The spacer of a gRNA can be or can be about 19, 20, or 21 nucleotides in length.

[0420] A gRNA or a guide polynucleotide can target any exon or intron of a gene target. In some embodiments, a composition comprises multiple gRNAs that all target the same exon or multiple gRNAs that target different exons. An exon and/or an intron of a gene can be targeted. A gRNA or a guide polynucleotide can target a nucleic acid sequence of about 20 nucleotides or less than about 20 nucleotides (e.g., at least about 5, 10, 15, 16, 17, 18, 19, 20, 21, 22, 23, 24, 25, 30 nucleotides), or anywhere between about 1-100 nucleotides (e.g., 5, 10, 15, 16, 17, 18, 19, 20, 21, 22, 23, 24, 25, 30, 40, 50, 60, 70, 80, 90, 100). A target nucleic acid sequence can be or can be about 20 bases immediately 5′ of the first nucleotide of the PAM. A gRNA can target a nucleic acid sequence. A target nucleic acid can be at least or at least about 1-10, 1-20, 1-30, 1-40, 1-50, 1-60, 1-70, 1-80, 1-90, or 1-100 nucleotides.

[0421] The guide polynucleotides may comprise standard ribonucleotides, modified ribonucleotides (e.g., pseudouridine), ribonucleotide isomers, and/or ribonucleotide analogs.

[0422] In some embodiments, a base editor system may comprise multiple guide polynucleotides, e.g., gRNAs. For example, the gRNAs may target to one or more target loci (e.g., at least 1 gRNA, at least 2 gRNA, at least 5 gRNA, at least 10 gRNA, at least 20 gRNA, at least 30 g RNA, at least 50 gRNA) comprised in a base editor system. The multiple gRNA sequences can be tandemly arranged and are separated in some embodiments by a direct repeat.

### Modified Polynucleotides

[0423] To enhance expression, stability, and/or genomic/base editing efficiency, and/or reduce possible toxicity, the base editor-coding sequence (e.g., mRNA) and/or the guide polynucleotide (e.g., gRNA) can be modified to include one or more modified nucleotides and/or chemical modifications, e.g. using pseudo-uridine, 5-Methyl-cytosine, 2′-O-methyl-3′-phosphonoacetate, 2′-O-methyl thioPACE (MSP), 2′-O-methyl-PACE (MP), 2′-fluoro RNA (2′-F-RNA), =constrained ethyl (S-cEt), 2′-O-methyl (‘M’), 2′-O-methyl-3′-phosphorothioate (‘MS’), 2′-O-methyl-3′-thiophosphonoacetate (‘MSP’), 5-methoxyuridine, phosphorothioate, and N1-Methylpseudouridine. Chemically protected gRNAs can enhance stability and editing efficiency in vivo and ex vivo. Methods for using chemically modified mRNAs and guide RNAs are known in the art and described, for example, by Jiang et al., Chemical modifications of adenine base editor mRNA and guide RNA expand its application scope. Nat Commun 11, 1979 (2020). doi.org/10.1038/s41467-020-15892-8, Callum et al., N1-Methylpseudouridine substitution enhances the performance of synthetic mRNA switches in cells, Nucleic Acids Research, Volume 48, Issue 6, 6 Apr. 2020, Page e35, and Andries et al., Journal of Controlled Release, Volume 217, 10 Nov. 2015, Pages 337-344, each of which is incorporated herein by reference in its entirety.

[0424] In some embodiments, the guide polynucleotide comprises one or more modified nucleotides at the 5′ end and/or the 3′ end of the guide. In some embodiments, the guide polynucleotide comprises two, three, four or more modified nucleosides at the 5′ end and/or the 3′ end of the guide. In some embodiments, the guide polynucleotide comprises two, three, four or more modified nucleosides at the 5′ end and/or the 3′ end of the guide.

[0425] In some embodiments, the guide comprises at least about 50%-75% modified nucleotides. In some embodiments, the guide comprises at least about 85% or more modified nucleotides. In some embodiments, at least about 1-5 nucleotides at the 5′ end of the gRNA are modified and at least about 1-5 nucleotides at the 3′ end of the gRNA are modified. In some embodiments, at least about 3-5 contiguous nucleotides at each of the 5′ and 3′ termini of the gRNA are modified. In some embodiments, at least about 20% of the nucleotides present in a direct repeat or anti-direct repeat are modified. In some embodiments, at least about 50% of the nucleotides present in a direct repeat or anti-direct repeat are modified. In some embodiments, at least about 50-75% of the nucleotides present in a direct repeat or anti-direct repeat are modified. In some embodiments, at least about 100 of the nucleotides present in a direct repeat or anti-direct repeat are modified. In some embodiments, at least about 20% or more of the nucleotides present in a hairpin present in the gRNA scaffold are modified. In some embodiments, at least about 50% or more of the nucleotides present in a hairpin present in the gRNA scaffold are modified. In some embodiments, the guide comprises a variable length spacer. In some embodiments, the guide comprises a 20-40 nucleotide spacer. In some embodiments, the guide comprises a spacer comprising at least about 20-25 nucleotides or at least about 30-35 nucleotides. In some embodiments, the spacer comprises modified nucleotides. In some embodiments, the guide comprises two or more of the following:
[0426] at least about 1-5 nucleotides at the 5′ end of the gRNA are modified and at least about 1-5 nucleotides at the 3′ end of the gRNA are modified;
[0427] at least about 20% of the nucleotides present in a direct repeat or anti-direct repeat are modified;
[0428] at least about 50-75% of the nucleotides present in a direct repeat or anti-direct repeat are modified;
[0429] at least about 20% or more of the nucleotides present in a hairpin present in the gRNA scaffold are modified;
[0430] a variable length spacer; and
[0431] a spacer comprising modified nucleotides.

[0432] In embodiments, the gRNA contains numerous modified nucleotides and/or chemical modifications. Such modifications can increase base editing ˜2 fold in vivo or in vitro. In embodiments, the gRNA comprises 2′-O-methyl or phosphorothioate modifications. In an embodiment, the gRNA comprises 2′-O-methyl and phosphorothioate modifications. In an embodiment, the modifications increase base editing by at least about 2 fold.

[0433] A guide polynucleotide may comprise one or more modifications to provide a nucleic acid with a new or enhanced feature. A guide polynucleotide may comprise a nucleic acid affinity tag. A guide polynucleotide may comprise synthetic nucleotide, synthetic nucleotide analog, nucleotide derivatives, and/or modified nucleotides.

[0434] A gRNA or a guide polynucleotide can also be modified by 5′ adenylate, 5′ guanosine-triphosphate cap, 5′ N7-Methylguanosine-triphosphate cap, 5′ triphosphate cap, 3′ phosphate, 3′ thiophosphate, 5′ phosphate, 5′ thiophosphate, Cis-Syn thymidine dimer, trimers, C12 spacer, C3 spacer, C6 spacer, dSpacer, PC spacer, rSpacer, Spacer 18, Spacer 9, 3′-3′ modifications, 2′-O-methyl thioPACE (MSP), 2′-O-methyl-PACE (MP), and constrained ethyl (S-cEt), 5′-5′ modifications, abasic, acridine, azobenzene, biotin, biotin BB, biotin TEG, cholesteryl TEG, desthiobiotin TEG, DNP TEG, DNP-X, DOTA, dT-Biotin, dual biotin, PC biotin, psoralen C2, psoralen C6, TINA, 3′ DABCYL, black hole quencher 1, black hole quencher 2, DABCYL SE, dT-DABCYL, IRDye QC-1, QSY-21, QSY-35, QSY-7, QSY-9, carboxyl linker, thiol linkers, 2′-deoxyribonucleoside analog purine, 2′-deoxyribonucleoside analog pyrimidine, ribonucleoside analog, 2′-O-methyl ribonucleoside analog, sugar modified analogs, wobble/universal bases, fluorescent dye label, 2′-fluoro RNA, 2′-O-methyl RNA, methylphosphonate, phosphodiester DNA, phosphodiester RNA, phosphothioate DNA, phosphorothioate RNA, UNA, pseudouridine-5′-triphosphate, 5′-methylcytidine-5′-triphosphate, or any combination thereof.

[0435] In some cases, a phosphorothioate enhanced RNA gRNA can inhibit RNase A, RNase T1, calf serum nucleases, or any combinations thereof. These properties can allow the use of PS-RNA gRNAs to be used in applications where exposure to nucleases is of high probability in vivo or in vitro. For example, phosphorothioate (PS) bonds can be introduced between the last 3-5 nucleotides at the 5′- or 3′-end of a gRNA which can inhibit exonuclease degradation. In some cases, phosphorothioate bonds can be added throughout an entire gRNA to reduce attack by endonucleases.

### Fusion Proteins or Complexes Comprising a Nuclear Localization Sequence (NL)

[0436] In some embodiments, the fusion proteins or complexes provided herein further comprise one or more (e.g., 2, 3, 4, 5) nuclear targeting sequences, for example a nuclear localization sequence (NLS). In one embodiment, a bipartite NLS is used. In some embodiments, a NLS comprises an amino acid sequence that facilitates the importation of a protein, that comprises an NLS, into the cell nucleus (e.g., by nuclear transport). In some embodiments, the NLS is fused to the N-terminus or the C-terminus of the fusion protein. In some embodiments, the NLS is fused to the C-terminus or N-terminus of an nCas9 domain or a dCas9 domain. In some embodiments, the NLS is fused to the N-terminus or C-terminus of the Cas12 domain. In some embodiments, the NLS is fused to the N-terminus or C-terminus of the cytidine or adenosine deaminase. In some embodiments, the NLS is fused to the fusion protein via one or more linkers. In some embodiments, the NLS is fused to the fusion protein without a linker. In some embodiments, the NLS comprises an amino acid sequence of any one of the NLS sequences provided or referenced herein. Additional nuclear localization sequences are known in the art and would be apparent to the skilled artisan. For example, NLS sequences are described in Plank et al., PCT/EP2000/011690, the contents of which are incorporated herein by reference for their disclosure of exemplary nuclear localization sequences.

[0437] In some embodiments, the NLS is present in a linker or the NLS is flanked by linkers, for example described herein. A bipartite NLS comprises two basic amino acid clusters, which are separated by a relatively short spacer sequence (hence bipartite—2 parts, while monopartite NLSs are not). The NLS of nucleoplasmin, KR[PAATKKAGQA]KKKK (SEQ ID NO: 191), is the prototype of the ubiquitous bipartite signal: two clusters of basic amino acids, separated by a spacer of about 10 amino acids. The sequence of an exemplary bipartite NLS follows:

(SEQ ID NO: 328)
PKKKRKVEGADKRTADGSEFESPKKKRKV

[0438] In some embodiments, any of the fusion proteins or complexes provided herein comprise an NLS comprising the amino acid sequence EGADKRTADGSEFESPKKKRKV (amino acids 8 to 29 of SEQ ID NO 328). In some embodiments, any of the adenosine base editors provided herein comprise the amino acid sequence EGADKRTADGSEFESPKKKRKV (amino acids 8 to 29 of SEQ ID NO: 328). In some embodiments, the NLS is at a C-terminal portion of the adenosine base editor. In some embodiemtns, the NLS is at the C-terminus of the adenosine base editor.

### Additional Domains

[0439] A base editor described herein can include any domain which helps to facilitate the nucleobase editing, modification or altering of a nucleobase of a polynucleotide. In some embodiments, a base editor comprises a polynucleotide programmable nucleotide binding domain (e.g., Cas9), a nucleobase editing domain (e.g., deaminase domain), and one or more additional domains. In some embodiments, the additional domain can facilitate enzymatic or catalytic functions of the base editor, binding functions of the base editor, or be inhibitors of cellular machinery (e.g., enzymes) that could interfere with the desired base editing result. In some embodiments, a base editor comprises a nuclease, a nickase, a recombinase, a deaminase, a methyltransferase, a methylase, an acetylase, an acetyltransferase, a transcriptional activator, or a transcriptional repressor domain.

[0440] In some embodiments, a base editor comprises an uracil glycosylase inhibitor (UGI) domain. In some cases, a base editor is expressed in a cell in trans with a UGI polypeptide. In some embodiments, cellular DNA repair response to the presence of U:G heteroduplex DNA can be responsible for a reduction in nucleobase editing efficiency in cells. In such embodiments, uracil DNA glycosylase (UDG) can catalyze removal of U from DNA in cells, which can initiate base excision repair (BER), mostly resulting in reversion of the U:G pair to a C:G pair. In such embodiments, BER can be inhibited in base editors comprising one or more domains that bind the single strand, block the edited base, inhibit UGI, inhibit BER, protect the edited base, and/or promote repairing of the non-edited strand. Thus, this disclosure contemplates a base editor fusion protein or complex comprising a UGI domain and/or a uracil stabilizing protein (USP) domain.

### Base Editor System

[0441] Provided herein are systems, compositions, and methods for editing a nucleobase using a base editor system. In some embodiments, the base editor system comprises (1) a base editor (BE) comprising a polynucleotide programmable nucleotide binding domain and a nucleobase editing domain (e.g., a deaminase domain) for editing the nucleobase; and (2) a guide polynucleotide (e.g., guide RNA) in conjunction with the polynucleotide programmable nucleotide binding domain. In some embodiments, the base editor system is a cytidine base editor (CBE) or an adenosine base editor (ABE). In some embodiments, the polynucleotide programmable nucleotide binding domain is a polynucleotide programmable DNA or RNA binding domain. In some embodiments, the nucleobase editing domain is a deaminase domain. In some embodiments, a deaminase domain can be a cytidine deaminase or an cytosine deaminase. In some embodiments, a deaminase domain can be an adenine deaminase or an adenosine deaminase. In some embodiments, the adenosine base editor can deaminate adenine in DNA. In some embodiments, the base editor is capable of deaminating a cytidine in DNA.

Use of the base editor system provided herein comprises the steps of: (a) contacting a target nucleotide sequence of a polynucleotide (e.g., double- or single stranded DNA or RNA) of a subject with a base editor system comprising a nucleobase editor (e.g., an adenosine base editor or a cytidine base editor) and a guide polynucleotide (e.g., gRNA), wherein the target nucleotide sequence comprises a targeted nucleobase pair; (b) inducing strand separation of said target region; (c) converting a first nucleobase of said target nucleobase pair in a single strand of the target region to a second nucleobase; and (d) cutting no more than one strand of said target region, where a third nucleobase complementary to the first nucleobase base is replaced by a fourth nucleobase complementary to the second nucleobase. It should be appreciated that in some embodiments, step (b) is omitted. In some embodiments, said targeted nucleobase pair is a plurality of nucleobase pairs in one or more genes. In some embodiments, the base editor system provided herein is capable of multiplex editing of a plurality of nucleobase pairs in one or more genes. In some embodiments, the plurality of nucleobase pairs is located in the same gene. In some embodiments, the plurality of nucleobase pairs is located in one or more genes, wherein at least one gene is located in a different locus.

[0442] The components of a base editor system (e.g., a deaminase domain, a guide RNA, and/or a polynucleotide programmable nucleotide binding domain) may be associated with each other covalently or non-covalently. For example, in some embodiments, the deaminase domain can be targeted to a target nucleotide sequence by a polynucleotide programmable nucleotide binding domain, optionally where the polynucleotide programmable nucleotide binding domain is complexed with a polynucleotide (e.g., a guide RNA). In some embodiments, a polynucleotide programmable nucleotide binding domain can be fused or linked to a deaminase domain. In some embodiments, a polynucleotide programmable nucleotide binding domain can target a deaminase domain to a target nucleotide sequence by non-covalently interacting with or associating with the deaminase domain. For example, in some embodiments, the nucleobase editing component (e.g., the deaminase component) comprises an additional heterologous portion or domain that is capable of interacting with, associating with, or capable of forming a complex with a corresponding heterologous portion, antigen, or domain that is part of a polynucleotide programmable nucleotide binding domain and/or a guide polynucleotide (e.g., a guide RNA) complexed therewith. In some embodiments, the polynucleotide programmable nucleotide binding domain, and/or a guide polynucleotide (e.g., a guide RNA) complexed therewith, comprises an additional heterologous portion or domain that is capable of interacting with, associating with, or capable of forming a complex with a corresponding heterologous portion, antigen, or domain that is part of a nucleobase editing domain (e.g., the deaminase component). In some embodiments, the additional heterologous portion may be capable of binding to, interacting with, associating with, or forming a complex with a polypeptide. In some embodiments, the additional heterologous portion may be capable of binding to, interacting with, associating with, or forming a complex with a polynucleotide. In some embodiments, the additional heterologous portion may be capable of binding to a guide polynucleotide. In some embodiments, the additional heterologous portion may be capable of binding to a polypeptide linker. In some embodiments, the additional heterologous portion is capable of binding to a polynucleotide linker. An additional heterologous portion may be a protein domain. In some embodiments, an additional heterologous portion comprises a polypeptide, such as a 22 amino acid RNA-binding domain of the lambda bacteriophage antiterminator protein N (N22p), a 2G12 IgG homodimer domain, an ABI, an antibody (e.g. an antibody that binds a component of the base editor system or a heterologous portion thereof) or fragment thereof (e.g. heavy chain domain 2 (CH2) of IgM (MHD2) or IgE (EHD2), an immunoglobulin Fc region, a heavy chain domain 3 (CH3) of IgG or IgA, a heavy chain domain 4 (CH4) of IgM or IgE, an Fab, an Fab2, miniantibodies, and/or ZIP antibodies), a barnase-barstar dimer domain, a Bcl-xL domain, a Calcineurin A (CAN) domain, a Cardiac phospholamban transmembrane pentamer domain, a collagen domain, a Com RNA binding protein domain (e.g. SfMu Com coat protein domain, and SfMu Com binding protein domain), a Cyclophilin-Fas fusion protein (CyP-Fas) domain, a Fab domain, an Fc domain, a fibritin foldon domain, an FK506 binding protein (FKBP) domain, an FKBP binding domain (FRB) domain of mTOR, a foldon domain, a fragment X domain, a GAI domain, a GID1 domain, a Glycophorin A transmembrane domain, a GyrB domain, a Halo tag, an HIV Gp41 trimerisation domain, an HPV45 oncoprotein E7 C-terminal dimer domain, a hydrophobic polypeptide, a K Homology (KH) domain, a Ku protein domain (e.g., a Ku heterodimer), a leucine zipper, a LOV domain, a mitochondrial antiviral-signaling protein CARD filament domain, an MS2 coat protein domain (MCP), a non-natural RNA aptamer ligand that binds a corresponding RNA motif/aptamer, a parathyroid hormone dimerization domain, a PP7 coat protein (PCP) domain, a PSD95-Dlgl-zo-1 (PDZ) domain, a PYL domain, a SNAP tag, a SpyCatcher moiety, a SpyTag moiety, a streptavidin domain, a streptavidin-binding protein domain, a streptavidin binding protein (SBP) domain, a telomerase Sm7 protein domain (e.g. Sm7 homoheptamer or a monomeric Sm-like protein), and/or fragments thereof. In embodiments, an additional heterologous portion comprises a polynucleotide (e.g., an RNA motif), such as an MS2 phage operator stem-loop (e.g., an MS2, an MS2 C-5 mutant, or an MS2 F-5 mutant), a non-natural RNA motif, a PP7 operator stem-loop, an SfMu phate Com stem-loop, a steril alpha motif, a telomerase Ku binding motif, a telomerase Sm7 binding motif, and/or fragments thereof. Non-limiting examples of additional heterologous portions include polypeptides with at least about 85% sequence identity to any one or more of SEQ ID NOs: 380, 382, 384, 386-388, or fragments thereof. Non-limiting examples of additional heterologous portions include polynucleotides with at least about 85% sequence identity to any one or more of SEQ ID NOs: 379, 381, 383, 385, or fragments thereof.

[0443] In some instances, components of the base editing system are associated with one another through the interaction of leucine zipper domains (e.g., SEQ ID NOs: 387 and 388). In some cases, components of the base editing system are associated with one another through polypeptide domains (e.g., FokI domains) that associate to form protein complexes containing about, at least about, or no more than about 1, 2 (i.e., dimerize), 3, 4, 5, 6, 7, 8, 9, 10 polypeptide domain units, optionally the polypeptide domains may include alterations that reduce or eliminate an activity thereof.

[0444] In some instances, components of the base editing system are associated with one another through the interaction of multimeric antibodies or fragments thereof (e.g., IgG, IgD, IgA, IgM, IgE, a heavy chain domain 2 (CH2) of IgM (MHD2) or IgE (EHD2), an immunoglobulin Fc region, a heavy chain domain 3 (CH3) of IgG or IgA, a heavy chain domain 4 (CH4) of IgM or IgE, an Fab, and an Fab2). In some instances, the antibodies are dimeric, trimeric, or tetrameric. In embodiments, the dimeric antibodies bind a polypeptide or polynucleotide component of the base editing system.

[0445] In some cases, components of the base editing system are associated with one another through the interaction of a polynucleotide-binding protein domain(s) with a polynucleotide(s). In some instances, components of the base editing system are associated with one another through the interaction of one or more polynucleotide-binding protein domains with polynucleotides that are self-complementary and/or complementary to one another so that complementary binding of the polynucleotides to one another brings into association their respective bound polynucleotide-binding protein domain(s).

[0446] In some instances, components of the base editing system are associated with one another through the interaction of a polypeptide domain(s) with a small molecule(s) (e.g., chemical inducers of dimerization (CIDs), also known as “dimerizers”). Non-limiting examples of CIDs include those disclosed in Amara, et al., “A versatile synthetic dimerizer for the regulation of protein-protein interactions,” PNAS, 94:10618-10623 (1997); and Voß, et al. “Chemically induced dimerization: reversible and spatiotemporal control of protein function in cells,” Current Opinion in Chemical Biology, 28:194-201 (2015), the disclosures of each of which are incorporated herein by reference in their entireties for all purposes. In some embodiments, the base editor inhibits base excision repair (BER) of the edited strand. In some embodiments, the base editor protects or binds the non-edited strand. In some embodiments, the base editor comprises UGI activity or USP activity. In some embodiments, the base editor comprises a catalytically inactive inosine-specific nuclease.

[0447] The base editors of the present disclosure may comprise any domain, feature or amino acid sequence which facilitates the editing of a target polynucleotide sequence. For example, in some embodiments, the base editor comprises a nuclear localization sequence (NLS). In some embodiments, an NLS of the base editor is localized between a deaminase domain and a polynucleotide programmable nucleotide binding domain. In some embodiments, an NLS of the base editor is localized C-terminal to a polynucleotide programmable nucleotide binding domain.

[0448] Protein domains included in the fusion protein can be a heterologous functional domain. Non-limiting examples of protein domains which can be included in the fusion protein include a deaminase domain (e.g., cytidine deaminase and/or adenosine deaminase), a uracil glycosylase inhibitor (UGI) domain, epitope tags, and reporter gene sequences. In some embodiments, the adenosine base editor (ABE) can deaminate adenine in DNA. In some embodiments, ABE is generated by replacing APOBEC1 component of BE3 with natural or engineered E. coli TadA, human ADAR2, mouse ADA, or human ADAT2. In some embodiments, ABE comprises an evolved TadA variant. In some embodiments, the base editor is ABE8.1, which comprises or consists essentially of the following sequence or a fragment thereof having adenosine deaminase activity: SEQ ID NO: 331. Other ABE8 sequences are provided in the attached sequence listing (SEQ ID NOs: 332-354).

[0449] In some embodiments, the base editor includes an adenosine deaminase variant comprising an amino acid sequence, which contains alterations relative to an ABE 7*10 reference sequence, as described herein. The term “monomer” as used in Table 7 refers to a monomeric form of TadA*7.10 comprising the alterations described. The term “heterodimer” as used in Table 7 refers to the specified wild-type E. coli TadA adenosine deaminase fused to a TadA*7.10 comprising the alterations as described.

TABLE 7
Adenosine Deaminase Base Editor Variants

| | Adenosine | |
|---|---|---|
| ABE | Deaminase | Adenosine Deaminase Description |
| ABE-605m | MSP605 | monomer_TadA*7.10 + V82G + Y147T + Q154S |
| ABE-680m | MSP680 | monomer_TadA*7.10 + I76Y + V82G + Y147T + Q154S |
| ABE-823m | MSP823 | monomer_TadA*7.10 + L36H + V82G + Y147T + Q154S + |
| | | N157K |
| ABE-824m | MSP824 | monomer_TadA*7.10 + V82G + Y147D + F149Y + Q154S + |
| | | D167N |
| ABE-825m | MSP825 | monomer_TadA*7.10 + L36H + V82G + Y147D + F149Y + |
| | | Q154S + N157K + D167N |
| ABE-827m | MSP827 | monomer_TadA*7.10 + L36H + I76Y + V82G + Y147T + |
| | | Q154S + N157K |
| ABE-828m | MSP828 | monomer_TadA*7.10 + I76Y + V82G + Y147D + F149Y + |
| | | Q154S + D167N |
| ABE-829m | MSP829 | monomer_TadA*7.10 + L36H + I76Y + V82G + Y147D + |
| | | F149Y + Q154S + N157K + D167N |
| ABE-605d | MSP605 | heterodimer_(WT) + (TadA*7.10 + V82G + Y147T + Q154S) |
| ABE-680d | MSP680 | heterodimer_(WT) + (TadA*7.10 + I76Y + V82G + Y147T + |
| | | Q154S) |
| ABE-823d | MSP823 | heterodimer_(WT) + (TadA*7.10 + L36H + V82G + Y147T + |
| | | Q154S + N157K) |
| ABE-824d | MSP824 | heterodimer_(WT) + (TadA*7.10 + V82G + Y147D + F149Y + |
| | | Q154S + D167N) |
| ABE-825d | MSP825 | heterodimer_(WT) + (TadA*7.10 + L36H + V82G + Y147D + |
| | | F149Y + Q154S + N157K + D167N) |
| ABE-827d | MSP827 | heterodimer_(WT) + (TadA*7.10 + L36H + I76Y + V82G + |
| | | Y147T + Q154S + N157K) |
| ABE-828d | MSP828 | heterodimer_(WT) + (TadA*7.10 + I76Y + V82G + Y147D + |
| | | F149Y + Q154S + D167N) |
| ABE-829d | MSP829 | heterodimer_(WT) + (TadA*7.10 + L36H + I76Y + V82G + |
| | | Y147D + F149Y + Q154S + N157K + D167N) |

[0450] In some embodiments, the base editor comprises a domain comprising all or a portion (e.g., a functional portion) of a uracil glycosylase inhibitor (UGI) or a uracil stabilizing protein (USP) domain.

### Linkers

[0451] In certain embodiments, linkers may be used to link any of the peptides or peptide domains of the disclosure. The linker may be as simple as a covalent bond, or it may be a polymeric linker many atoms in length. In certain embodiments, the linker is a polypeptide or based on amino acids. In other embodiments, the linker is not peptide-like. In certain embodiments, the linker is a covalent bond (e.g., a carbon-carbon bond, disulfide bond, carbon-heteroatom bond, etc.).

[0452] In some embodiments, any of the fusion proteins provided herein, comprise a cytidine or adenosine deaminase and a Cas9 domain that are fused to each other via a linker. Various linker lengths and flexibilities between the cytidine or adenosine deaminase and the Cas9 domain can be employed (e.g., ranging from very flexible linkers of the form (GGGS)n (SEQ ID NO: 246), (GGGGS)n (SEQ ID NO: 247), and (G)n to more rigid linkers of the form (EAAAK)n (SEQ ID NO: 248), (SGGS)n (SEQ ID NO: 355), SGSETPGTSESATPES (SEQ ID NO: 249) (see, e.g., Guilinger J P, et al. Fusion of catalytically inactive Cas9 to FokI nuclease improves the specificity of genome modification. Nat. Biotechnol. 2014; 32(6): 577-82; the entire contents are incorporated herein by reference) and (XP)n) in order to achieve the optimal length for activity for the cytidine or adenosine deaminase nucleobase editor. In some embodiments, n is 1, 2, 3, 4, 5, 6, 7, 8, 9, 10, 11, 12, 13, 14, or 15. In some embodiments, the linker comprises a (GGS)n motif, wherein n is 1, 3, or 7. In some embodiments, cytidine deaminase or adenosine deaminase and the Cas9 domain of any of the fusion proteins provided herein are fused via a linker comprising the amino acid sequence SGSETPGTSESATPES (SEQ ID NO: 249), which can also be referred to as the XTEN linker.

[0453] In some embodiments, the domains of the base editor are fused via a linker that comprises the amino acid sequence of:

(SEQ ID NO: 356)
SGGSSGSETPGTSESATPESSGGS,
(SEQ ID NO: 357)
SGGSSGGSSGSETPGTSESATPESSGGSSGGS,
or
(SEQ ID NO: 358)
GGSGGSPGSPAGSPTSTEEGTSESATPESGPGTSTEPSEGSAPGSPAGS
PTSTEEGTSTEPSEGSAPGTSTEPSEGSAPGTSESATPESGPGSEPATS
GGSGGS.

[0454] In some embodiments, domains of the base editor are fused via a linker comprising the amino acid sequence SGSETPGTSESATPES (SEQ ID NO: 249), which may also be referred to as the XTEN linker. In some embodiments, a linker comprises the amino acid sequence SGGS (SEQ ID NO: 355). In some embodiments, the linker is 24 amino acids in length. In some embodiments, the linker comprises the amino acid sequence SGGSSGGSSGSETPGTSESATPES (SEQ ID NO: 359). In some embodiments, the linker is 40 amino acids in length. In some embodiments, the linker comprises the amino acid sequence: SGGSSGGSSGSETPGTSESATPESSGGSSGGSSGGSSGGS (SEQ ID NO: 360). In some embodiments, the linker is 64 amino acids in length. In some embodiments, the linker comprises the amino acid sequence: SGGSSGGSSGSETPGTSESATPESSGGSSGGSSGGSSGGSSGSETPGTSESATPESSGGSSG GS (SEQ ID NO: 361). In some embodiments, the linker is 92 amino acids in length. In some embodiments, the linker comprises the amino acid sequence:

(SEQ ID NO: 362)
PGSPAGSPTSTEEGTSESATPESGPGTSTEPSEGSAPGSPAGSPTSTEE
GTSTEPSEGSAPGTSTEPSEGSAPGTSESATPESGPGSEPATS.

In some embodiments, a linker comprises a plurality of proline residues and is 5-21, 5-14, 5-9, 5-7 amino acids in length, e.g., PAPAP (SEQ ID NO: 363), PAPAPA (SEQ ID NO: 364), PAPAPAP (SEQ ID NO: 365), PAPAPAPA (SEQ ID NO: 366), P(AP)4 (SEQ ID NO: 367), P(AP)7 (SEQ ID NO: 368), P(AP)10 (SEQ ID NO: 369) (see, e.g., Tan J, Zhang F, Karcher D, Bock R. Engineering of high-precision base editors for site-specific single nucleotide replacement. Nat Commun. 2019 Jan. 25; 10(1):439; the entire contents are incorporated herein by reference). Such proline-rich linkers are also termed “rigid” linkers.
Nucleic Acid Programmable DN4 Binding Proteins with Guide RNAs

[0455] Provided herein are compositions and methods for base editing in cells. Further provided herein are compositions comprising a guide polynucleotide sequence, e.g., a guide RNA sequence, or a combination of 2, 3, 4, 5, 6, 7, 8, 9, 10, 11, 12, 13, 14, 15, 16, 17, 18, 19, 20, or more guide RNAs as provided herein. In some embodiments, a composition for base editing as provided herein further comprises a polynucleotide that encodes a base editor, e.g., a C-base editor or an A-base editor. For example, a composition for base editing may comprise a mRNA sequence encoding a BE, a BE4, an ABE, and a combination of one or more guide RNAs as provided. A composition for base editing may comprise a base editor polypeptide and a combination of one or more of any guide RNAs provided herein. Such a composition may be used to effect base editing in a cell through different delivery approaches, for example, electroporation, nucleofection, viral transduction or transfection. In some embodiments, the composition for base editing comprises an mRNA sequence that encodes a base editor and a combination of one or more guide RNA sequences provided herein for electroporation.

[0456] Some aspects of this disclosure provide systems comprising any of the fusion proteins or complexes provided herein, and a guide RNA bound to a nucleic acid programmable DNA binding protein (napDNAbp) domain (e.g., a Cas9 (e.g., a dCas9, a nuclease active Cas9, or a Cas9 nickase) or Cas12) of the fusion protein or complex. These complexes are also termed ribonucleoproteins (RNPs). In some embodiments, the guide nucleic acid (e.g., guide RNA) is from 15-100 nucleotides long and comprises a sequence of at least 10 contiguous nucleotides that is complementary to a target sequence. In some embodiments, the target sequence is a DNA sequence. In some embodiments, the target sequence is an RNA sequence. In some embodiments, the target sequence is a sequence in the genome of a bacteria, yeast, fungi, insect, plant, or animal. In some embodiments, the target sequence is a sequence in the genome of a human. In some embodiments, the 3′ end of the target sequence is immediately adjacent to a canonical PAM sequence (NGG). In some embodiments, the 3′ end of the target sequence is immediately adjacent to a non-canonical PAM sequence (e.g., a sequence listed in Table 3 or 5′-NAA-3′). In some embodiments, the guide nucleic acid (e.g., guide RNA) is complementary to a sequence in a gene of interest (e.g., a gene associated with a disease or disorder).

[0457] Some aspects of this disclosure provide methods of using the fusion proteins, or complexes provided herein. For example, some aspects of this disclosure provide methods comprising contacting a DNA molecule with any of the fusion proteins or complexes provided herein, and with at least one guide RNA, wherein the guide RNA is about 15-100 nucleotides long and comprises a sequence of at least 10 contiguous nucleotides that is complementary to a target sequence.

[0458] The domains of the base editor disclosed herein can be arranged in any order.

[0459] A defined target region can be a deamination window. A deamination window can be the defined region in which a base editor acts upon and deaminates a target nucleotide. In some embodiments, the deamination window is within a 2, 3, 4, 5, 6, 7, 8, 9, or 10 base regions. In some embodiments, the deamination window is 5, 6, 7, 8, 9, 10, 11, 12, 13, 14, 15, 16, 17, 18, 19, 20, 21, 22, 23, 24, or 25 bases upstream of the PAM.

[0460] The base editors of the present disclosure may comprise any domain, feature or amino acid sequence which facilitates the editing of a target polynucleotide sequence.

### Methods of Using Fusion Proteins or Complexes Comprising a Cytidine or Adenosine Dearminase and a Cas9 Domain

[0461] Some aspects of this disclosure provide methods of using the fusion proteins, or complexes provided herein. For example, some aspects of this disclosure provide methods comprising contacting a DNA molecule with any of the fusion proteins or complexes provided herein, and with at least one guide RNA described herein.

[0462] In some embodiments, a fusion protein or complex of the disclosure is used for editing a target gene of interest. In particular, a cytidine deaminase or adenosine deaminase nucleobase editor described herein is capable of making multiple mutations within a target sequence. These mutations may affect the function of the target. For example, when a cytidine deaminase or adenosine deaminase nucleobase editor is used to target a regulatory region the function of the regulatory region is altered and the expression of the downstream protein is reduced or eliminated.

### Base Editor Efficiency

[0463] In some embodiments, the purpose of the methods provided herein is to alter a gene and/or gene product via gene editing. The nucleobase editing proteins provided herein can be used for gene editing-based human therapeutics in vitro or in vivo. It will be understood by the skilled artisan that the nucleobase editing proteins provided herein, e.g., the fusion proteins or complexes comprising a polynucleotide programmable nucleotide binding domain (e.g., Cas9) and a nucleobase editing domain (e.g., an adenosine deaminase domain or a cytidine deaminase domain) can be used to edit a nucleotide from A to G or C to T.

[0464] Advantageously, base editing systems as provided herein provide genome editing without generating double-strand DNA breaks, without requiring a donor DNA template, and without inducing an excess of stochastic insertions and deletions as CRISPR may do. In some embodiments, the present disclosure provides base editors that efficiently generate an intended mutation, such as a STOP codon, in a nucleic acid (e.g., a nucleic acid within a genome of a subject) without generating a significant number of unintended mutations, such as unintended point mutations.

[0465] The base editors of the disclosure advantageously modify a specific nucleotide base encoding a protein without generating a significant proportion of indels (i.e., insertions or deletions). Such indels can lead to frame shift mutations within a coding region of a gene.

[0466] In some embodiments, the base editors provided herein are capable of generating a ratio of intended mutations to indels (i.e., intended point mutations:unintended point mutations) that is greater than 1:1. In some embodiments, the base editors provided herein are capable of generating a ratio of intended mutations to indels that is at least 1.5:1, at least 2:1, at least 2.5:1, at least 3:1, at least 3.5:1, at least 4:1, at least 4.5:1, at least 5:1, at least 5.5:1, at least 6:1, at least 6.5:1, at least 7:1, at least 7.5:1, at least 8:1, at least 10:1, at least 12:1, at least 15:1, at least 20:1, at least 25:1, at least 30:1, at least 40:1, at least 50:1, at least 100:1, at least 200:1, at least 300:1, at least 400:1, at least 500:1, at least 600:1, at least 700:1, at least 800:1, at least 900:1, or at least 1000:1, or more. The number of intended mutations and indels may be determined using any suitable method.

[0467] In some embodiments, the base editors provided herein can limit formation of indels in a region of a nucleic acid. In some embodiments, the region is at a nucleotide targeted by a base editor or a region within 2, 3, 4, 5, 6, 7, 8, 9, or 10 nucleotides of a nucleotide targeted by a base editor. In some embodiments, any of the base editors provided herein can limit the formation of indels at a region of a nucleic acid to less than 1%, less than 1.5%, less than 2%, less than 2.5%, less than 3%, less than 3.5%, less than 4%, less than 4.5%, less than 5%, less than 6%, less than 7%, less than 8%, less than 9%, less than 10%, less than 12%, less than 15%, or less than 20%.

[0468] Base editing is often referred to as a “modification”, such as, a genetic modification, a gene modification and modification of the nucleic acid sequence and is clearly understandable based on the context that the modification is a base editing modification. A base editing modification is therefore a modification at the nucleotide base level, for example as a result of the deaminase activity discussed throughout the disclosure, which then results in a change in the gene sequence and may affect the gene product.

[0469] In some embodiments, the modification, e.g., single base edit results in about or at least about a 10%, 15%, 20%, 25%, 30%, 35%, 40%, 45%, 50%, 55%, 60%, 65%, 70%, 75%, 80%, 85%, 90%, 95%, 99%, or 100% reduction, or reduction to an undetectable level, of the gene targeted expression.

[0470] The disclosure provides adenosine deaminase variants (e.g., ABE8 variants) that have increased efficiency and specificity. In particular, the adenosine deaminase variants described herein are more likely to edit a desired base within a polynucleotide and are less likely to edit bases that are not intended to be altered (e.g., “bystanders”).

[0471] In some embodiments, any of the base editing system comprising one of the ABE8 base editor variants described herein has reduced bystander editing or mutations by at least 1%, 2%, 3%, 4%, 5%, 10%, 15%, 20%, 25%, 30%, 35%, 40%, 45%, 50%, 55%, 60%, 65%, 70%, 75%, 80%, 85%, 90%, 95%, or 99% compared to a base editor system comprising an ABE7 base editor, e.g., ABE7.10.

[0472] In some embodiments, any of the ABE8 base editor variants described herein has higher base editing efficiency compared to the ABE7 base editors. In some embodiments, any of the ABE8 base editor variants described herein have at least 1%, 2%, 3%, 4%, 5%, 10%, 15%, 20%, 25%, 30%, 35%, 40%, 45%, 50%, 55%, 60%, 65%, 70%, 75%, 80%, 85%, 90%, 95%, 99%, 100%, 105%, 110%, 115%, 120%, 125%, 130%, 135%, 140%, 145%, 150%, 155%, 160%, 165%, 170%, 175%, 180%, 185%, 190%, 195%, 200%, 210%, 220%, 230%, 240%, 250%, 260%, 270%, 280%, 290%, 300%, 310%, 320%, 330%, 340%, 350%, 360%, 370%, 380%, 390%, 400%, 450%, or 500% higher base editing efficiency compared to an ABE7 base editor, e.g., ABE7.10.

[0473] The ABE8 base editor variants described herein may be delivered to a host cell via a plasmid, a vector, a LNP complex, or an mRNA. In some embodiments, any of the ABE8 base editor variants described herein is delivered to a host cell as an mRNA.

[0474] In some embodiments, the method described herein, for example, the base editing methods has minimum to no off-target effects. In some embodiments, the method described herein, for example, the base editing methods, has minimal to no chromosomal translocations.

[0475] In some embodiments, the base editing method described herein results in about 91%, 92%, 93%, 94%, 95%, 96%, 97%, 98%, 99% or 100% of a cell population that have been successfully edited.

[0476] In some embodiments, the percent of viable cells in a cell population following a base editing intervention is greater than at least 60%, 70%, 80%, or 90% of the starting cell population at the time of the base editing event. In some embodiments, the percent of viable cells in a cell population following editing is about 70%. In some embodiments, the percent of viable cells in a cell population following editing is about 75%. In some embodiments, the percent of viable cells in a cell population following editing is about 80%. In some embodiments, the percent of viable cells in a cell population as described above is about 85%. In some embodiments, the percent of viable cells in a cell population as described above is about 90%, or about 91%, 92%, 93%, 94% 95%, 96%, 97%, 98%, 99%, or 100% of the cells in the population at the time of the base editing event.

[0477] In embodiments, the cell population is a population of cells contacted with a base editor, complex, or base editor system of the present disclosure.

[0478] The number of intended mutations and indels can be determined using any suitable method, for example, as described in International PCT Application Nos. PCT/US2017/045381 (WO2018/027078) and PCT/US2016/058344 (WO2017/070632); Komor, A. C., et al., “Programmable editing of a target base in genomic DNA without double-stranded DNA cleavage” Nature 533, 420-424 (2016); Gaudelli, N. M., et al., “Programmable base editing of A·T to G·C in genomic DNA without DNA cleavage” Nature 551, 464-471 (2017); and Komor, A. C., et al., “Improved base excision repair inhibition and bacteriophage Mu Gam protein yields C:G-to-T:A base editors with higher efficiency and product purity” Science Advances 3:eaao4774 (2017); the entire contents of which are hereby incorporated by reference.

[0479] In some embodiments, to calculate indel frequencies, sequencing reads are scanned for exact matches to two 10-bp sequences that flank both sides of a window in which indels can occur. If no exact matches are located, the read is excluded from analysis. If the length of this indel window exactly matches the reference sequence the read is classified as not containing an indel. If the indel window is two or more bases longer or shorter than the reference sequence, then the sequencing read is classified as an insertion or deletion, respectively. In some embodiments, the base editors provided herein can limit formation of indels in a region of a nucleic acid. In some embodiments, the region is at a nucleotide targeted by a base editor or a region within 2, 3, 4, 5, 6, 7, 8, 9, or 10 nucleotides of a nucleotide targeted by a base editor.

### Multiplex Editing

[0480] In some embodiments, the base editor system provided herein is capable of multiplex editing of a plurality of nucleobase pairs in one or more genes or polynucleotide sequences. In some embodiments, the plurality of nucleobase pairs is located in the same gene or in one or more genes, wherein at least one gene is located in a different locus. In some embodiments, the multiplex editing comprises one or more guide polynucleotides. In some embodiments, the multiplex editing comprises one or more base editor systems. In some embodiments, the multiplex editing comprises one or more base editor systems with a single guide polynucleotide or a plurality of guide polynucleotides. In some embodiments, the multiplex editing comprises one or more guide polynucleotides with a single base editor system. It should be appreciated that the characteristics of the multiplex editing using any of the base editors as described herein can be applied to any combination of methods using any base editor provided herein. It should also be appreciated that the multiplex editing using any of the base editors as described herein may comprise a sequential editing of a plurality of nucleobase pairs.

[0481] In some embodiments, the base editor system capable of multiplex editing of a plurality of nucleobase pairs in one or more genes comprises one of ABE7, ABE8, and/or ABE9 base editors.

### Expression of Polypeptides in a Host Cell

[0482] Polypeptides of the present disclosure may be expressed in virtually any host cell of interest, including mammalian cells (e.g., human cells). In some embodiments, the host cell is an immune cell (e.g., T- or NK-cell). In some embodiments, the host cell is an allogeneic immune cell (e.g., T- or NK-cell). In some embodiments, the host cell is a CAR-T cell.

[0483] An expression vector containing a DNA encoding a nucleic acid sequence-recognizing module and/or a nucleic acid base converting enzyme can be produced, for example, by linking the DNA to the downstream of a promoter in a suitable expression vector.

[0484] In some embodiments, the nucleic acid sequence is inserted into the genome of the cell (e.g., T cell or NK cell) by introducing a vector, for example, a viral or non-viral vector, comprising the nucleic acid. Examples of viral vectors include, but are not limited to, adeno-associated viral (AAV) vectors, retroviral vectors or lentiviral vectors. In some embodiments, the lentiviral vector is an integrase-deficient lentiviral vector. In some embodiments, the nucleic acid sequence is inserted into the genome of the cell (e.g., T cell) via non-viral delivery. In non-viral delivery methods, the nucleic acid can be naked DNA, or in a non-viral plasmid or vector.

[0485] Regarding the promoter to be used, any promoter appropriate for a host to be used for gene expression can be used. For example, when the host is an animal cell, an SRα promoter, SV40 promoter, LTR promoter, cytomegalovirus (CMV) promoter, Rous sarcoma virus (RSV) promoter, Moloney mouse leukemia virus (MoMuLV), LTR, herpes simplex virus thymidine kinase (HSV-TK), MND (a synthetic promoter that contains the U3 region of a modified MoMuLV LTR with myeloproliferative sarcoma virus enhancer) promoter, and the like can be used. Of these, CMV promoter, SR.alpha. promoter and the like may advantageously be employed in some embodiments.

### Delivery Systems

### Nucleic Acid-Based Delivery of Base Editor Systems

[0486] Nucleic acid molecules encoding a base editor system according to the present disclosure can be administered to subjects or delivered into cells in vitro or in vivo by art-known methods or as described herein. For example, a base editor system comprising a deaminase (e.g., cytidine or adenine deaminase) can be delivered by vectors (e.g., viral or non-viral vectors), or by naked DNA, DNA complexes, lipid nanoparticles, or a combination of the aforementioned compositions. A base editor system may be delivered to a cell using any methods available in the art including, but not limited to, physical methods (e.g., electroporation, particle gun, calcium phosphate transfection), viral methods, non-viral methods (e.g., liposomes, cationic methods, lipid nanoparticles, polymeric nanoparticles), or biological non-viral methods (e.g., attenuated bacterial, engineered bacteriophages, mammalian virus-like particles, biological liposomes, erythrocyte ghosts, exosomes).

[0487] Nanoparticles, which can be organic or inorganic, are useful for delivering a base editor system or component thereof. Nanoparticles are well known in the art and any suitable nanoparticle can be used to deliver a base editor system or component thereof, or a nucleic acid molecule encoding such components. In one example, organic (e.g., lipid and/or polymer) nanoparticles are suitable for use as delivery vehicles in certain embodiments of this disclosure. Non-limiting examples of lipid nanoparticles suitable for use in the methods of the present disclosure include those described in International Patent Application Publications No. WO2022140239, WO2022140252, WO2022140238, WO2022159421, WO2022159472, WO2022159475, WO2022159463, WO2021113365, and WO2021141969, the disclosures of each of which is incorporated herein by reference in its entirety for all purposes.

### Viral Vectors

[0488] A base editor described herein can be delivered with a viral vector. In some embodiments, a base editor disclosed herein can be encoded on a nucleic acid that is contained in a viral vector. In some embodiments, one or more components of the base editor system can be encoded on one or more viral vectors. Non-limiting examples of viral vectors include lentivirus (e.g., HIV and FIV-based vectors), Adenovirus (e.g., AD100), Retrovirus (e.g., Maloney murine leukemia virus, MML-V), herpesvirus vectors (e.g., HSV-2), and Adeno-associated viruses (AAVs), or other plasmid or viral vector types.

### Non-Viral Platforms for Gene Transfer

[0489] Non-viral platforms for introducing a heterologous polynucleotide into a cell of interest are known in the art.

[0490] For example, the disclosure provides a method of inserting a heterologous polynucleotide into the genome of a cell using a Cas9 or Cas12 (e.g., Cas12b) ribonucleoprotein complex (RNP)-DNA template complex where an RNP including a Cas9 or Cas12 nuclease domain and a guide RNA, wherein the guide RNA specifically hybridizes to a target region of the genome of the cell, and wherein the Cas9 nuclease domain cleaves the target region to create an insertion site in the genome of the cell. A DNA template is then used to introduce a heterologous polynucleotide. In embodiments, the DNA template is a double-stranded or single-stranded DNA template, wherein the size of the DNA template is about 200 nucleotides or is greater than about 200 nucleotides, wherein the 5′ and 3′ ends of the DNA template comprise nucleotide sequences that are homologous to genomic sequences flanking the insertion site. In some embodiments, the DNA template is a single-stranded circular DNA template. In embodiments, the molar ratio of RNP to DNA template in the complex is from about 3:1 to about 100:1.

[0491] In some embodiments, the DNA template is a linear DNA template. In some examples, the DNA template is a single-stranded DNA template. In certain embodiments, the single-stranded DNA template is a pure single-stranded DNA template. In some embodiments, the single stranded DNA template is a single-stranded oligodeoxynucleotide (ssODN).

[0492] In other embodiments, a single-stranded DNA (ssDNA) can produce efficient homology-directed repair (HDR) with minimal off-target integration. In one embodiment, an ssDNA phage is used to efficiently and inexpensively produce long circular ssDNA (cssDNA) donors. These cssDNA donors serve as efficient HDR templates when used with Cas9 or Cas12 (e.g., Cas12a, Cas12b), with integration frequencies superior to linear ssDNA (lssDNA) donors.

[0493] In some embodiments, a heterologous polynucleotide may be inserted into the genome of a cell using a transposable element such as a transposon, as described, for example, in Tipanee, et al. Human Gene Therapy, November 2017, 1087-1104, DOI: 10.1089/hum.2017.128. Transposable elements are divided into two categories: retrotransposons and DNA transposons. Transposable elements can alter the genome of the host cells through insertions, duplications, deletions, and translocations. Retrotransposons are described as mobile elements that employ an RNA intermediate that is first reverse transcribed into a complementary single-stranded (c) DNA strand by a reverse transcriptase encoded by the retrotransposon. Subsequently, the single-stranded DNA is converted into a double-stranded DNA that then integrates into the host genome. This so-called “replicative mechanism” yields several new copies of retrotransposons expanding throughout the target genome over evolutionary time. Retrotransposons are categorized into many subtypes according to the DNA sequences of the long terminal repeats and its open reading frames. Retrotransposons were employed to enable transgene integration into the target cell DNA, in some cases relying on adenoviral delivery. Alternatively, DNA transposons translocate via a “non-replicative mechanism,” whereby two Terminal Inverted Repeats (TIRs) are recognized and cleaved by a transposase enzyme, releasing the cognate DNA transposons with free DNA ends. The excised DNA transposons then integrate into a new genomic region where target sites are recognized and cut by the same transposase. This cut-and-paste mechanism usually duplicates DNA target sites upon insertion, leaving target site duplications (TSDs). Non-limiting examples of transposons include the Sleeping Beauty (SB) transposon, the piggyBac (PB) transposon, and Tol2 transposable elements.

### Inteins

[0494] Inteins (intervening protein) are auto-processing domains found in a variety of diverse organisms, which carry out a process known as protein splicing.

[0495] Non-limiting examples of inteins include any intein or intein-pair known in the art, which include a synthetic intein based on the dnaE intein, the Cfa-N (e.g., split intein-N) and Cfa-C (e.g., split intein-C) intein pair, has been described (e.g., in Stevens et al., J Am Chem Soc. 2016 Feb. 24; 138(7):2162-5, incorporated herein by reference), and DnaE. Non-limiting examples of pairs of inteins that may be used in accordance with the present disclosure include: Cfa DnaE intein, Ssp GyrB intein, Ssp DnaX intein, Ter DnaE3 intein, Ter ThyX intein, Rma DnaB intein and Cne Prp8 intein (e.g., as described in U.S. Pat. No. 8,394,604, incorporated herein by reference). Exemplary nucleotide and amino acid sequences of inteins are provided in the Sequence Listing at SEQ ID NOs: 370-377 and 389-424. Inteins suitable for use in embodiments of the present disclosure and methods for use thereof are described in U.S. Pat. No. 10,526,401, International Patent Application Publication No. WO 2013/045632 or WO 2020/051561, and in U.S. Patent Application Publication No. US 2020/0055900, the full disclosures of which are incorporated herein by reference in their entireties by reference for all purposes.

[0496] Intein-N and intein-C may be fused to the N-terminal portion of a split Cas9 and the C-terminal portion of the split Cas9, respectively, for the joining of the N-terminal portion of the split Cas9 and the C-terminal portion of the split Cas9. For example, in some embodiments, an intein-N is fused to the C-terminus of the N-terminal portion of the split Cas9, i.e., to form a structure of N-[N-terminal portion of the split Cas9]-[intein-N]-C. In some embodiments, an intein-C is fused to the N-terminus of the C-terminal portion of the split Cas9, i.e., to form a structure of N-[intein-C]-[C-terminal portion of the split Cas9]-C. In embodiments, a base editor is encoded by two polynucleotides, where one polynucleotide encodes a fragment of the base editor fused to an intein-N and another polynucleotide encodes a fragment of the base editor fused to an intein-C. Methods for designing and using inteins are known in the art and described, for example by WO2014004336, WO2017132580, WO2013045632A1, US20150344549, and US20180127780, each of which is incorporated herein by reference in their entirety.

[0497] In some embodiments, an ABE was split into N- and C-terminal fragments at Ala, Ser, Thr, or Cys residues within selected regions of SpCas9. These regions correspond to loop regions identified by Cas9 crystal structure analysis.

[0498] The N-terminus of each fragment is fused to an intein-N and the C-terminus of each fragment is fused to an intein C at amino acid positions S303, T310, T313, S355, A456, S460, A463, T466, S469, T472, T474, C574, S577, A589, and S590, referenced to SEQ ID NO: 197.

### Pharmaceutical Compositions

[0499] In some aspects, the present disclosure provides a pharmaceutical composition comprising any of the cells, polynucleotides, vectors, base editors, base editor systems, guide polynucleotides, fusion proteins, complexes, or the fusion protein-guide polynucleotide complexes described herein.

[0500] The pharmaceutical compositions of the present disclosure can be prepared in accordance with known techniques. See, e.g., Remington, The Science And Practice of Pharmacy (21st ed. 2005). In general, the cell, or population thereof is admixed with a suitable carrier prior to administration or storage, and in some embodiments, the pharmaceutical composition further comprises a pharmaceutically acceptable carrier. Suitable pharmaceutically acceptable carriers generally comprise inert substances that aid in administering the pharmaceutical composition to a subject, aid in processing the pharmaceutical compositions into deliverable preparations, or aid in storing the pharmaceutical composition prior to administration. Pharmaceutically acceptable carriers can include agents that can stabilize, optimize or otherwise alter the form, consistency, viscosity, pH, pharmacokinetics, solubility of the formulation. Such agents include buffering agents, wetting agents, emulsifying agents, diluents, encapsulating agents, and skin penetration enhancers. For example, carriers can include, but are not limited to, saline, buffered saline, dextrose, arginine, sucrose, water, glycerol, ethanol, sorbitol, dextran, sodium carboxymethyl cellulose, and combinations thereof.

[0501] In some embodiments, the pharmaceutical composition is formulated for delivery to a subject. Suitable routes of administrating the pharmaceutical composition described herein include, without limitation: topical, subcutaneous, transdermal, intradermal, intralesional, intraarticular, intraperitoneal, intravesical, transmucosal, gingival, intradental, intracochlear, transtympanic, intraorgan, epidural, intrathecal, intramuscular, intravenous, intravascular, intraosseus, periocular, intratumoral, intracerebral, and intracerebroventricular administration.

[0502] In some embodiments, the pharmaceutical composition described herein is administered locally to a diseased site. In some embodiments, the pharmaceutical composition described herein is administered to a subject by injection, by means of a catheter, by means of a suppository, or by means of an implant, the implant being of a porous, non-porous, or gelatinous material, including a membrane, such as a sialastic membrane, or a fiber.

[0503] In some embodiments, any of the fusion proteins, gRNAs, and/or complexes described herein are provided as part of a pharmaceutical composition. In some embodiments, the pharmaceutical composition comprises any of the fusion proteins or complexes provided herein. In some embodiments pharmaceutical composition comprises a gRNA, a nucleic acid programmable DNA binding protein, a cationic lipid, and a pharmaceutically acceptable excipient. In embodiments, pharmaceutical compositions comprise a lipid nanoparticle and a pharmaceutically acceptable excipient. In embodiments, the lipid nanoparticle contains a gRNA, a base editor, a complex, a base editor system, or a component thereof of the present disclosure, and/or one or more polynucleotides encoding the same. Pharmaceutical compositions can optionally comprise one or more additional therapeutically active substances.

[0504] The compositions, as described above, can be administered in effective amounts. The effective amount will depend upon the mode of administration, the particular condition being treated, and the desired outcome. It may also depend upon the stage of the condition, the age and physical condition of the subject, the nature of concurrent therapy, if any, and like factors well-known to the medical practitioner. For therapeutic applications, it is that amount sufficient to achieve a medically desirable result.

[0505] In some embodiments, compositions in accordance with the present disclosure can be used for treatment of any of a variety of diseases, disorders, and/or conditions.

### Methods of Treatment

[0506] Some aspects of the present disclosure provide methods of treating a subject in need, the method comprising administering to a subject in need an effective therapeutic amount of a pharmaceutical composition as described herein. More specifically, the methods of treatment include administering to a subject in need thereof one or more pharmaceutical compositions comprising one or more cells having at least one edited gene. In other embodiments, the methods of the disclosure comprise expressing or introducing into a cell a base editor polypeptide and one or more guide RNAs capable of targeting a nucleic acid molecule encoding at least one polypeptide

[0507] One of ordinary skill in the art would recognize that multiple administrations of the pharmaceutical compositions contemplated in particular embodiments may be required to affect the desired therapy. For example, a composition may be administered to the subject 1, 2, 3, 4, 5, 6, 7, 8, 9, or 10 or more times over a span of 1 week, 2 weeks, 3 weeks, 1 month, 2 months, 3 months, 4 months, 5 months, 6 months, 1 year, 2 years, 5, years, 10 years, or more.

[0508] Administration of the pharmaceutical compositions contemplated herein may be carried out using conventional techniques including, but not limited to, infusion, transfusion, or parenterally. In some embodiments, parenteral administration includes infusing or injecting intravascularly, intravenously, intramuscularly, intraarterially, intrathecally, intratumorally, intradermally, intraperitoneally, transtracheally, subcutaneously, subcuticularly, intraarticularly, subcapsularly, subarachnoidly and intrasternally.

### Kits

[0509] The disclosure provides kits for the treatment of an autoimmune disease or a neoplasia (e.g., a lymphoma) in a subject. In some embodiments, the kit further includes a base editor system or a polynucleotide encoding a base editor system, wherein the base editor polypeptide system a nucleic acid programmable DNA binding protein (napDNAbp), a deaminase, and a guide RNA. In some embodiments, the napDNAbp is Cas9 or Cas12. In some embodiments, the polynucleotide encoding the base editor is a mRNA sequence. In some embodiments, the deaminase is a cytidine deaminase or an adenosine deaminase. In some embodiments, the kit comprises an edited cell and instructions regarding the use of such cell.

[0510] The kits may further comprise written instructions for using a base editor, base editor system and/or edited cell as described herein. In other embodiments, the instructions include at least one of the following: precautions; warnings; clinical studies; and/or references. The instructions may be printed directly on the container (when present), or as a label applied to the container, or as a separate sheet, pamphlet, card, or folder supplied in or with the container. In a further embodiment, a kit comprises instructions in the form of a label or separate insert (package insert) for suitable operational parameters. In yet another embodiment, the kit comprises one or more containers with appropriate positive and negative controls or control samples, to be used as standard(s) for detection, calibration, or normalization. The kit can further comprise a second container comprising a pharmaceutically-acceptable buffer, such as (sterile) phosphate-buffered saline, Ringer's solution, or dextrose solution. It can further include other materials desirable from a commercial and user standpoint, including other buffers, diluents, filters, needles, syringes, and package inserts with instructions for use.

[0511] The practice of the embodiments of the present disclosure employs, unless otherwise indicated, conventional techniques of molecular biology (including recombinant techniques), microbiology, cell biology, biochemistry and immunology, which are well within the purview of the skilled artisan. Such techniques are explained fully in the literature, such as, “Molecular Cloning: A Laboratory Manual”, second edition (Sambrook, 1989); “Oligonucleotide Synthesis” (Gait, 1984); “Animal Cell Culture” (Freshney, 1987); “Methods in Enzymology” “Handbook of Experimental Immunology” (Weir, 1996); “Gene Transfer Vectors for Mammalian Cells” (Miller and Calos, 1987); “Current Protocols in Molecular Biology” (Ausubel, 1987); “PCR: The Polymerase Chain Reaction”, (Mullis, 1994); “Current Protocols in Immunology” (Coligan, 1991). These techniques are applicable to the production of the polynucleotides and polypeptides of the disclosure, and, as such, may be considered in making and practicing the embodiments of the disclosure. Particularly useful techniques for particular embodiments will be discussed in the sections that follow.

[0512] The following examples are put forth so as to provide those of ordinary skill in the art with a complete disclosure and description of how to make and use the assay, screening, and therapeutic methods of the disclosure, and are not intended to limit the scope of what the inventors regard as their invention.

### EXAMPLES

### Example 1: Base Edited Chimeric Antigen Receptor (CAR) T Cells Showed Improved Function Relative to Unedited Cells after being Exposed to the Target Antigen

[0513] Base editing can be used to modify chimeric antigen receptor expressing T cells (CAR-T cells) to improve their function (see, e.g., FIG. 1). Genetic alterations that improve the ability of the CAR-T cells to function in treating a disease can be referred to as “efficacy edits.” Non-limiting examples of CAR-T cell functions that can be improved through efficacy edits include, but are not limited to, reduced cost of production, reduced or eliminated lymphodepletion, improved function in treatment of solid tumors, improved function in treatment of a disease (e.g., an autoimmune disease), improved potency so that only a small number (e.g., one) doses is necessary for treatment of a disease, and reduced toxicity. Persistent antigen stimulation of CAR-T cells (see, e.g., cells repeatedly exposed to antigen as shown in FIG. 3A) can lead to T cell dysfunction, also referred to as T cells in an “exhausted” or “functionally exhausted” state, characterized by one or more of the following: reduced cytotoxicity (FIG. 3B), reduced proliferation (FIG. 3C), reduced cytokine production, increase in inhibitory receptors, reduced survival, and/or upregulation of repressor genes relative to resting CAR-T cells that were not repeatedly or continuously exposed to antigen. Accordingly, experiments were undertaken to identify efficacy edits carried out using base editing that were effective in reducing levels of T cell dysfunction/exhaustion after repeated or continuous exposure to and stimulation by an antigen. In particular, base editing was used to reduce or eliminate expression of each of the proteins listed in Table 8 below (see also FIG. 4) and the ability of the cells to resist dysfunction resulting from multiple antigen exposures was then evaluated. The proteins were negative regulators of T cell function and functioned in processes such as, to name a few, T cell receptor (TCR) and/or cytokine signaling, gene expression regulation, or cell growth and differentiation, or functioned as transcription factors (FIG. 4).

TABLE 8
List of proteins whose expression was reduced or eliminated through base editing
in CAR-T cells to evaluate the impact of the reduced or eliminated expression
on CAR-T cell function following repeated antigen exposures. For select gene
targets, the guide(s) used in the Examples to target the gene for base editing,
unless indicated otherwise, is indicated under “More info.”

| Protein | Gene | Type | More info. |
|---|---|---|---|
| ARID1A | ARID1A | | Guide: EF117 |
| BATF | BATF | | Guide: EF114 |
| CBLB | CBLB | E3 ubiquitin-protein | Guide: EF2 |
| | | ligase which promotes | |
| | | protease-mediated | |
| | | protein degradation | |
| CD5 | CD5 | Cluster of | Guide: EF94 |
| | | differentiation 5 | |
| Chop | DDIT3 | Downstream sensor of | Guide: EF24. |
| | | ER stress | |
| CISH | CISH | Cytokine Inducible | Guide: EF1 |
| | | SH2 Containing | |
| | | Protein | |
| DCK | DCK | Nucleoside protein | Nucleoside protein |
| | | kinase | kinase. Guide: EF46 |
| DGKα/ζ | DGKα/ζ | Diacylglycerol kinase | Inhibitor in T-cell signal |
| | | | transduction. Guide for |
| | | | DGKa: EF51. Guide for |
| | | | DGKz: EF54. |
| DHX37 | DHX37 | DEAH-Box Helicase | ATP-binding RNA |
| | | 37 | helicase. Guide: EF101. |
| DNMT3A | DNMT3A | Epigenetic regulator | Responsible for de novo |
| | | | methylation. Guide: |
| | | | EF15. |
| EIF2A | EIF2A | Eukaryotic translation | Guide: EF70 |
| | | initiation factor | |
| FLI-1 | FLI-1 | ETS family | Guide: EF20 |
| | | transcription factor | |
| ID3 | ID3 | DNA-binding protein | Guide: EF74 |
| | | inhibitor | |
| IKZF2 | IKZF2 | Member of Ikaros | Upregulated in exhausted |
| | | transcription regulator | T cells. Guide: EE76 |
| | | family (aka Helios) | |
| IL-6 | IL-6 | Interleukin 6 | Cytokine. Guide: EF105 |
| | | | or EF106 |
| PFN1 | PFN1 | Profilin 1 | Regulates |
| | | | actin polymerization. |
| | | | Guide: EF112. |
| PRDM1 | PRDM1 | PR/SET Domain 1 | Repressor of IFNb |
| | | (aka BLIMP-1) | expression. Guide: EF58. |
| PRKACA | PRKACA | Protein Kinase | cAMP-dependent protein |
| | | CAMP-Activated | kinase. Guide: EF62. |
| | | Catalytic Subunit | |
| | | Alpha | |
| PTP1B | PTPN1 | Protein tyrosine | Important in metabolism, |
| | | phosphatase | glucose homeostasis |
| PTPN6 | PTPN6 | Protein Tyrosine | Guide: EF65. |
| | | Phosphatase Non- | |
| | | Receptor Type 6 (aka | |
| | | SHP-1) | |
| RASA2 | RASA2 | RAS P21 Protein | Inhibitory regulator of the |
| | | Activator 2 | Ras-cyclic AMP |
| | | | pathway. Guide: EF96. |
| Regnase-1 | ZC3H12A | Zinc Finger CCCH- | Transcriptional activator. |
| | | Type Containing 12A | Guide: EF25 and/or |
| | | | EF26. |
| Roquin-1 | R3CH1 | Ring Finger And | Recognizes and binds to a |
| | | CCCH-Type Domains | constitutive decay |
| | | 1 | element (CDE) in the 3′ |
| | | | UTR of mRNAs, leading |
| | | | to mRNA deadenylation |
| | | | and degradation. Guide: |
| | | | EF8 |
| SOCS1 | SOCS1 | Suppressor Of | Guide: EF7 |
| | | Cytokine Signaling 1 | |
| SOX4 | SOX4 | Transcription factor | Guide: EF85 |
| | | involved in cell fate | |
| | | determination | |
| TLE | TLE | Repressor of signaling | Transcriptional |
| | | pathways via | corepressor of multiple |
| | | transcription factors | genes encoding |
| | | | inflammatory cytokines. |
| | | | Guide for TLE4: EF86 |
| TMEM184B | TMEM184B | Transmembrane | Guide: EF91 |
| | | protein | |
| TMEM222 | TMEM222 | Transmembrane | Guide: EF107, EF108, |
| | | Protein 222 | EF109, or EF110 |

[0514] To evaluate the impact of reduced or eliminated expression of each of the polypeptides listed in Table 8 on CAR-T cell resistance to exhaustion after repeated or continuous stimulation by antigen exposures, base editing was used to introduce nucleotide alterations to polynucleotides encoding the polypeptides in CAR-T cells that led to a reduction or elimination in expression of the polypeptides. All of the CAR-T cells expressed an anti-CD19 chimeric antigen receptor containing the following domains, from N-terminus to C-terminus: an anti-CD19 scFv antigen binding domain, a CD8-derived hinge domain, a CD8-derived transmembrane domain, a 4-1BB costimulatory domain, and a CD3ζ domain. The chimeric antigen receptors were fused at the C-terminus by way of a T2A self-cleaving peptide to an epidermal growth factor receptor (EGFR) derived tag. The amino acid sequence of the anti-CD19 chimeric antigen receptor is provided below and in the Sequence Listing as SEQ ID NO: 830. The chimeric antigen receptor (CAR) was introduced to the T cells by transducing them using a lentiviral particle containing a polynucleotide encoding the CAR. The CAR-T cells were each prepared using T cells collected from a human donor subject. The CAR-T cells were base edited using base editor systems containing guide polynucleotides containing spacers and/or sgRNA sequences listed in Tables 1, 2A, and/or 2B in combination with one of the suitable base editors listed in Table 2B and corresponding to the spacer of the guide polynucleotide. Unless indicated otherwise, cells referenced in the figures of the application were base edited using the base editor ABE8.20m in combination with a guide polynucleotide containing a sequence corresponding to a sequence listed in Table 20 above. The base editor systems were introduced into the T cells by contacting the cells with the guide polynucleotide and an mRNA molecule encoding the base editor (ABE8.20m). The base editor systems introduced base edits to polynucleotides encoding each of the polypeptides listed in Table 8 that disrupted expression of the polypeptides therefrom by either 1) disrupting a start codon, 2) disrupting a splice acceptor (SA) site, 3) disrupting a splice donor (SD) site, 4) or introducing a stop codon (see FIG. 5). The nucleobases targeted for base editing were contained within about the first 50% of the nucleotides of each polynucleotide corresponding to the mRNA molecule transcribed therefrom and encoding the polypeptide. The base editing window for each base editor system was from about 4 to about 7 nucleotides. Western blots were used to confirm that base editing resulted in reduced or eliminated expression of the polypeptides. For example, Western Blots were used to confirm that cells base edited using one of the following guide polynucleotides (see Tables 1 and 2A for corresponding sequences) showed reduced or undetectable expression of the polypeptides (e.g., CBLB, PTP1B, DNMT3A, CISH, SOCS1, and FLI-1) encoded by polynucleotides targeted with the following guides, whose sequences are provided at Tables 1 and 2A: EF46, EF47, EF48, EF49, EF50, EF51, EF52, EF53, EF54, EF55, EF56, EF57, EF58, EF59, EF60, EF61, EF62, EF63, EF64, EF65, EF66, EF67, EF68, EF69, EF70, EF71, EF72, EF73, EF74, EF75, EF76, EF77, EF86, EF87, EF88, EF89, EF90, EF91, EF92, EF93, EF94, EF95, EF96, EF97, EF98, EF99, EF100, EF101, EF102, EF103, EF104, EF105, EF106, EF107, EF108, EF109, EF110, EF111, EF112, and EF113 (FIG. 6). Next-generation sequencing was used to evaluate percent on-target editing efficiencies for many of the base editor systems (FIGS. 15A-15C), and many of the base editor systems, including those containing one of the following guide polynucleotides (see Tables 1 and 2A for corresponding sequences), had percent on-target editing efficiencies of over about 80%: EF1, EF2, EF3, EF4, EF7, EF8, EF12, EF14, EF15, EF19, EF20, EF24, EF25, EF26, EF46, EF47, EF51, EF54, EF56, EF57, EF58, EF62, EF65, EF70, EF71, EF74, EF76, EF86, EF89, EF91, EF93, EF94, EF96, EF98, EF99, EF101, EF102, EF104, EF105, EF107, EF108, and EF110.

[0515] An experiment was undertaken to determine whether cells base edited to reduce or eliminate expression of one of the following polypeptides: CISH, CBLB, PTP1B, SOCS1, Roquin-1, DNMT3A, FLI-1, Chop, and Regnase-1 still had cytotoxic capacity. To evaluate the cytotoxic capacity of the base-edited CAR-T cells, the cells were co-cultured with target cells (Nalm6 B cell precursor leukemia cells initiated from an adolescent male and that expressed green fluorescent protein (GFP)) at an effector to target cell ratio (E:T) of 1:5, and target cell proliferation was monitored over time by measuring GFP fluorescence/expression. Interestingly, the base-edited CAR-T cells maintained the ability to kill the target cells, as shown by clearance of the antigen-expressing target cells from the co-culture (FIG. 7).

[0516] An experiment was undertaken to show that the base-edited CAR-T cells showed improved antigen-dependent expansion/proliferation relative to unedited CAR-T cells. CAR-T cells base edited to reduce or eliminate expression of CISH, CBLB, PTP1B, SOCS1, Roquin-1, DNMT3A, FLI-1, Chop, or Regnase-1 were either exposed to target antigen (CD19) (antigen-dependent expansion) at days 0, 3, and 9 or never exposed to antigen (antigen-independent expansion) and fold expansion was monitored from day 0 to day 15. It was determined that CAR-T cells base edited to reduce or eliminate expression of CISH, SOCS1, or Roquin-1 showed increased antigen-dependent expansion relative to unedited CAR-T cells (FIGS. 8A-8D).

[0517] An experiment was next undertaken to evaluate whether the base-edited CAR-T cells showed improved proliferation relative to unedited CAR-T cells after multiple antigen exposures. CAR-T cells base edited to reduce or eliminate expression of DCK, DGKa, DGKz, PRDM1 (BLIMP-1), PRKACA, PTPN6, EIF2A, ID3, IKZF2, SOX4, TLE4, TMEM184B, CD5, RASA2, DHX37, PFN1, BATF, or ARID1A were stimulated multiple times (e.g., four times for the data shown in FIG. 18A) by being exposed to antigen (see FIG. 3A) and then co-cultured overnight with Nalm6 cells (B cell precursor leukemia cells initiated from an adolescent male) at an effector to target cell (E:T) ratio of, for example, 1:1 in FIG. 18B. All of the CAR-T cells were prepared using T cells collected from the same donor subject. CAR-T cells base edited to reduce or eliminate expression of DCK, DGKa, DGKz, EIF2A, RASA2, PFN1, or ARID1A showed enhanced proliferation after the four antigen exposures relative to unedited CAR-T cells (FIGS. 18A and 18B). This indicates that base editing to reduce expression of DCK, DGKa, DGKz, EIF2A, RASA2, PFN1, or ARID1A polypeptides was effective in overcoming exhaustion related reductions in proliferation.

[0518] An experiment was then undertaken to determine whether CAR-T cells base edited to reduce or eliminate expression of CISH, CBLB, PTP1B, SOCS1, Roquin-1, DNMT3A, FLI-1, Chop, or Regnase-1 polypeptides showed reduced levels of dysfunction relative to unedited CAR-T cells after repeated antigen exposures. The CAR-T cells were exposed to target antigen four times, as shown in FIG. 3A, and then co-cultured with Nalm6 (B cell precursor leukemia cells initiated from an adolescent male) that expressed green fluorescent protein (GFP) at an effector to target cell (E:T) ratio of 1:5. Clearance of the Nalm6 target cells was evaluated by measuring GFP fluorescence in the co-culture over time. All of the base-edited CAR-T cells showed increased capacity to clear the Nalm6 tumor cells from the co-culture relative to the unedited CAR-T cells (FIGS. 9A-9J), thereby showing that the base edited CAR-T cells showed improved resistance to exhaustion associated with repeated antigen stimulations.

[0519] A further experiment was undertaken to determine whether CAR-T cells base edited to reduce or eliminate expression of DCK, CD5, DGKα/ζ (DGKa and DGKz), DHX37, EIF2A, ID3, IKZF2, IL-6, PFN1, PRDM1, PRKACA, PTPN6, RASA2, SOX4, TLE, TMEM184B, or TMEM222 showed reduced levels of exhaustion, measured as increased cytotoxicity, relative to unedited CAR-T cells after repeated antigen exposures. Prior to measuring cytotoxicity, the CAR-T cells were stimulated four times by being exposed to CD19 antigen (see FIG. 3A). To measure cytotoxicity, the cells were co-cultured overnight with Nalm6 cells (B cell precursor leukemia cells initiated from an adolescent male) expressing green fluorescent protein (GFP) at an effector to target cell (E:T) ratio of 1:5. Clearance of the Nalm6 cells was measured over time using live cell fluorescent imaging carried out using an IncuCyte® Live-Cell Analysis System. Many of the base-edited CAR-T cells showed increased cytotoxicity (i.e., improved resistance to exhaustion) after multiple antigen exposures relative to unedited CAR-T cells (FIGS. 19A-19C).

[0520] A similar experiment was then undertaken to determine whether chimeric antigen receptor (CAR) T cells base edited to reduce or eliminate expression of CD5 showed reduced levels of dysfunction, measured as increased cytotoxicity, relative to unedited CAR-T cells after repeated antigen exposures. The CAR-T cells were co-cultured with target cells at effector to target cell ratios (E:T) of 1:1, 1:2, 1:4, and 1:8, and lysis/clearance of the target cells was evaluated after 24 hours and 48 hours of coculture. Prior to being co-cultured with target cells, the T cells were exposed to CD19 antigen six (6) times (see FIG. 3A). The target cells were either JeKo-1 cells (a mantle cell lymphoma (MCL) cell line isolated from the peripheral blood mononuclear cells of a 78-year-old female with a large cell variant of MCL showing leukemic conversion) or Nalm6 cells (B cell precursor leukemia cells initiated from an adolescent male). The base-edited CAR-T cells showed increased cytotoxicity against both the JeKo-1 and the Nalm6 target cells at all evaluated E:T ratios after repeated exposures to the target antigen (a CD19 antigen) relative to unedited CAR-T cells (FIGS. 20A-20D).

[0521] The observed improvement in resistance to dysfunction associated with repeated antigen stimulations observed in the base-edited CAR-T cells was observed across donors. Anti-CD19 CAR-T cells prepared from two different human donor subjects (Donor 1 and Donor 2) were base-edited as described above to reduce or eliminate expression of CISH, SOCS1, or Roquin-1. The CAR-T cells were exposed to target antigen 4 times, as shown in FIG. 3A, and then co-cultured with Nalm6 (B cell precursor leukemia cells initiated from an adolescent male) that expressed green fluorescent protein (GFP) at an effector to target cell (E:T) ratio of 1:5 and clearance of the Nalm6 target cells was evaluated by measuring GFP fluorescence in the co-culture over time. The base-edited CAR-T cells showed increased capacity to clear the Nalm6 tumor cells from the co-culture relative to the unedited CAR-T cells (FIG. 10), regardless of the donor from which the CAR-T cells were derived. Therefore, the improved resistance to dysfunction was observed in CAR-T cells across different donor subjects (i.e., in T cells derived from different donor subjects).

[0522] CAR-T cells base edited to reduce or eliminate expression of CISH, CBLB, SOCS1, Roquin-1, or DNMT3A showed improved intrinsic phenotypes after repeated stimulations by a target antigen, relative to unedited CAR-T cells. For example, when the base edited CAR-T cells were exposed to antigen four times (see protocol shown in FIG. 3A), the CAR-T cells showed lower fold reductions in instances of the Ki67+ phenotype and lower levels of the EOMES+ T-bet− phenotype relative to the unedited CAR-T cells (FIGS. 11A and 11B). EOMES+ and T-bet− are factors linked to an exhausted T cell phenotype, and a higher reduction in Ki67+ indicates a higher reduction in proliferation. Therefore, the lower fold reductions (i.e., lower magnitude of negative fold changes) in Ki67+ indicated that the base edited CAR-T cells had increased capacity for proliferation relative to the unedited CAR-T cells, and the reduced instance of the EOMES+T-bet− phenotype in the base-edited CAR-T cells indicated a reduction in occurrences of an exhausted phenotype (e.g., reduced cytotoxicity, reduced proliferation, reduced cytokine production, reduced survival, increase in inhibitory receptors, and/or upregulation of repressor genes) in the base edited CAR-T cells.

[0523] CAR-T cells base edited to reduce or eliminate expression of CISH, SOCS1, or Roquin-1 maintained robust cytokine (e.g., GZMB, IL-2, IFNg, TNFa) secretion after repeated antigen exposures. The CAR-T cells were exposed to antigen four times (see FIG. 3A) prior to co-culturing the cells with target cells and subsequently measuring, in pg/mL, secretion of the cytokines granzyme B (GZMB; FIG. 12A), interferon gamma (IFNg; FIG. 12B), interleukin-2 (IL-2; FIG. 12C), and tumor necrosis factor alpha (TNFa; FIG. 12D). Prior to measuring cytokine secretion, the CAR-T cells were co-cultured with target cells (Nalm6 B cell precursor leukemia cells initiated from an adolescent male and that expressed green fluorescent protein (GFP)) at an effector to target cell ratio (E:T) of 1:1. The base edited CAR-T cells showed increased levels of secretion of most of the cytokines relative to unedited CAR-T cells.

[0524] CAR-T cells base edited to reduce or eliminate expression of DCK, DGKa, DGKz, PRDM1 (BLIMP-1), PRKACA, PTPN6, EIF2A, ID3, IKZF2, SOX4, TLE4, TMEM184B, CD5, RASA2, DHX37, PFN1, BATF, or ARID1A had altered CD4+ to CD8+ ratios and enhanced activation by antigen after repeated antigen exposures relative to unedited CAR-T cells. Prior to measuring CD4+ to CD8+ ratios or cell activation using flow cytometry (see, e.g., FIG. 16A), the CAR-T cells were stimulated four (4) times by being exposed to antigen (see FIG. 3A) and then co-cultured overnight with Nalm6 cells (B cell precursor leukemia cells initiated from an adolescent male) at an effector to target cell (E:T) ratio of 1:1. It was found that the base edited CAR-T cells showed altered CD4+ to CD8+ ratios relative to unedited CAR-T cells (FIG. 16B). For example, the CAR-T cells base edited to reduce or eliminate expression of DGKz, PRKACA, PTPN6, RASA2, or DHX37 all showed increased instances of the CD4+ phenotype and reduced instances of the CD8+ phenotype relative to unedited CAR-T cells (FIG. 16B). It was also found that the base edited CAR-T cells having the CD8+ or CD4+ phenotype showed enhanced levels of activation relative to unedited CAR-T cells, where increases in activation was measured as increased instances of the CD25+ phenotype (FIGS. 17A and 17B). These findings confirmed that base edited CAR-T cells showed improved resistance to developing an exhausted phenotype after repeated antigen exposures relative to unedited CAR-T cells.

[0525] Experiments were next undertaken using two sub-therapeutic models to evaluate the ability of the base edited CAR-T cells to clear tumor cells from a subject in vivo. In a first experiment, anti-tumor activity of CAR-T cells base edited using the base editor ABE8.20m in combination with a guide polynucleotide corresponding to EF01, EF02, EF08, EF15, EF20, EF24, or EF25 (see Tables 1, 2A, and 2B for sequences) to reduce or eliminate expression of CISH, CBLB, SOCS1, Roquin-1, DNMT3A, FLI-1, CHOP, or Regnase-1, respectively, was evaluated using a sub-therapeutic B cell lymphoma (BCL) model involving the intravenous administration of 5E5 Raji cells (a human B lymphoblastoid cell line derived from a patient with Burkitt lymphoma) expressing luciferase into 6-7 week-old NSG female mice (Jackson Labs: Stock 05557) at day zero (0) and subsequently infusing 1E6 of the base edited CAR-T cells (N=10 for each base-edited CAR-T cell and N=10 or 5 for non-base-edited cells) into the mice at day 1. Groups were randomized based on mouse body weight. Tumor clearance was monitored over time (2×/wk) by measuring luciferase flux in photons per second (p/s) in the mice using an IVIS® Spectrum in vivo imaging system. Also, measurements of mouse bodyweights were measured and clinical observations were collected 2×/wk. Several of the base edited CAR-T cells (e.g., cells base edited to reduce or eliminate expression of FLI-1) showed improved antitumor activity in vivo in the BCL model (FIGS. 13A-13D).

[0526] In a second experiment, anti-tumor activity of CAR-T cells base edited using the base editor ABE8.20m in combination with a guide polynucleotide corresponding to EF01, EF02, EF07, EF08, EF15, EF20, EF96, EF25, EF94, or EF4 (see Tables 1, 2A, and 2B for sequences) to reduce or eliminate expression of CISH, CBLB, SOCS1, Roquin-1, DNMT3A, FLI-1, RASA2, Regnase-1, CD5, or PDP1B, respectively, was evaluated using a sub-therapeutic mantle cell lymphoma (MCL) model involving the intravenous administration of 5E5 JeKo-1 cells (a mantle cell lymphoma (MCL) cell line isolated from the peripheral blood mononuclear cells of a 78-year-old female with a large cell variant of MCL showing leukemic conversion) expressing luciferase into 6-7 week-old NSG female mice (Jackson Labs: Stock 05557) at day zero (0) and subsequently infusing 2.5E5 CAR-T cells (N=10 for each base-edited CAR-T cell and N=10 or 5 for each non-base-edited cells) into the mice at day 7. Groups were randomized based on mouse body weight. Tumor clearance was monitored over time (2×/wk) by measuring luciferase flux in photons per second (p/s) in the mice using an IVIS® Spectrum in vivo imaging system, and tumor size was also evaluated at the termination of the experiment using bioluminescence imaging. Also, measurements of mouse bodyweights were measured and clinical observations were collected 2×/wk. Some of the base edited CAR-T cells (e.g., CAR-T cells base edited to reduce or eliminate expression of Roquin-1) showed prolonged tumor control in the MCL model. Some of the base edited CAR-T cells (e.g., CAR-T cells base edited to knock-out expression of CBLB, SOCS1, FLI-1, or Roquin-1) showed improved clearance of the JeKo-1 cells from the mice relative to unedited CAR-T cells (FIGS. 14A, 14B, 24A, 24B, and 24C). Often (10) mice administered Roquin-1 knock-out CAR-T cells, eight (8) were observed to be responders showing higher reductions in JeKo-1 cells than mice administered CAR-T cells expressing Roquin-1 (FIG. 24C).

[0527] Therefore, base editing of CAR-T cells to reduce or eliminate expression of polypeptide selected from those listed in Table 8 (alterations that may be referred to as “efficacy edits”) was an effective strategy for reducing susceptibility of the CAR-T cells to developing an exhausted phenotype after continuous or multiple antigen exposures and/or improving the efficacy of the CAR-T cells in killing target cells in vitro and/or in vivo. Table 9 provides a summary of data gathered in the above-described experiments relating to the CAR-T cells.

TABLE 9
Summary of data for CAR-T cells edited to knock-out expression
of polypeptides selected from those listed in Table 8.

| Name of | | | | Cytotoxicity | | |
|---|---|---|---|---|---|---|
| guide RNA | | | | after repeat | Repeated | In vivo |
| used to | | On- | | stim. | stim. | activity |
| knock-out | | target | | (AUC² | Expansion | (AUC¹ |
| the target | Target | editing | Protein KO | WT/AUC | (fold exp. | WT/AUC |
| gene | Gene | efficiency | (WB)¹ | edit) | over WT) | edit) |
| EF1 | CISH | 88% | Yes | 1.6 | 1.5 | — |
| EF7 | SOCS1 | 93% | Yes | 1.8 | 2 | — |
| EF8 | Roquin-1 | 97% | Yes by ELISA | 2.8 | 4 | 38 |
| EF15 | DNMT3A | 95% | Yes | 1.4 | 1 | — |
| EF20 | FLI1 | 97% | Yes | 0.9 | 1 | 11 |
| EF51 | DGKa | 82% | Yes | 1.1 | 2 | — |
| EF54 | DGKz | 88% | Reduced | 1.2 | 2.5 | 20 |
| | | | expression | | | |
| EF62 | PRKACA | 82% | Reduced | 1.3 | 1 | 0.5 |
| | | | expression | | | |
| EF65 | PTPN6 | 88% | Reduced | 1.8 | 1 | — |
| | | | expression | | | |
| EF70 | EIF2A | 85% | Yes | 1.8 | 2.5 | 0.6 |
| EF96 | RASA2 | 93% | Yes | 1.8 | 2 | 0.7 |
| EF101 | DHX37 | 94% | Yes | 2.2 | 0.5 | — |

¹Protein knockout was measured using Western blots (WB) unless indicated otherwise.
²Area under curve.

### Example 2: Roquin-1 Knock-Out Chimeric Antigen Receptor (CAR) T Cells Showed Improved Function Relative to Unedited Cells after being Exposed to the Target Antigen

[0528] Experiments were undertaken to demonstrate that (KO) chimeric antigen receptor (CAR) T cells modified as described in Example 1 to knock-out expression of Roquin-1 showed improved function both in vitro and in vivo relative to CAR-T cells expressing Roquin-1 after being exposed either continuously and/or multiple times in succession to the antigen targeted by the CAR-T cells. Not intending to be bound by theory, knock-out of Roquin-1 may improve T cell function because Roquin-1 is a polypeptide involved in mRNA degradation (FIG. 32). Binding of Roquin-1 (e.g., at the 3′ untranslated region (UTR) of mRNA) targets an mRNA for degradation. Roquin-1 mRNA targets include, as non-limiting examples, 1) mRNAs associated with DNA replication and cell proliferation (e.g., IRF4, Pola1, Prim1, and Prim2), 2) pro-inflammatory cytokines (e.g., TNFa, IL-2), and 3) T cell costimulatory receptors (e.g., ICOS, OX40). Improved cytotoxicity of anti-CD19 CAR T cells modified to knock-out expression of Roquin-1 was observed across cells expressing CAR polypeptides having different co-stimulatory domains. Roquin-1 KO T cells expressing a chimeric antigen receptor (CAR) polypeptide containing an anti-CD19 scFv as an antigen-binding domain, either a 4-1BB costimulatory domain or a CD28 co-stimulatory domain, and a CD3ζ signaling domain showed increased cytotoxicity relative to CAR-T cells expressing Roquin-1 when co-cultured with JeKo-1 cells at an effector-to-target (E:T) ratio of 1:5 (FIGS. 21A and 21B) following six consecutive plate-bound antigen exposures carried out as described in FIG. 3A.

[0529] The improved cytotoxicity of CAR-T cells modified to knock-out expression of Roquin-1 was observed across CAR-T cells expressing different antigen binding domains. For example, the increase in cytotoxicity described above for CAR-T cells expressing a chimeric antigen receptor (CAR) polypeptide containing an anti-CD19 scFv as an antigen-binding domain, a 4-1BB costimulatory domain, and a CD3ζ signaling domain was also observed in CAR-T cells expressing a CAR polypeptide containing an anti-CD22 scFv as an antigen-binding domain, a 4-1BB costimulatory domain, and a CD3ζ signaling domain (FIGS. 22A to 22C). The CAR-T cells were co-cultured with Nalm-6 cells at effector-to-target ratios (E:T) of 1:2, 1:5, and 1:10 following four consecutive plate-bound antigen stimulations carried out as described in FIG. 3A. The increase in cytotoxicity was observed across all E:T ratios evaluated.

[0530] Increased cytotoxicity of CAR-T cells modified as described in Example 1 to knock-out expression of Roquin-1, as well as other polypeptides listed in Table 8, relative to unmodified CAR-T cells was observed for CAR-T cells expressing two different chimeric antigen receptors (CARs) (FIG. 23). One of the two CAR polypeptide contained an anti-CD19 scFv domain, a 4-1BB costimulatory domain, and a CD3ζ signaling domain, and the other CAR polypeptide contained an anti-ROR1 scFv domain, a CD28 costimulatory domain, and a CD3ζ signaling domain. The CAR-T cells were co-cultured with JeKo-1 cells expressing green fluorescent protein (GFP) at an effector-to-target ratio (E:T) of 1:5.

[0531] An experiment was undertaken to demonstrate, in vivo, that CAR-T cells modified as described in Example 1 to knock out expression of Roquin-1 showed improved ability to clear tumors in a mouse and control tumor clearance relative to unmodified CAR-T cells and CAR-T cells modified to knock-out expression of DGKz or FLI-1. The CAR-T cells expressed a CAR polypeptide containing an anti-CD19 scFv as an antigen-binding domain, a 4-1BB costimulatory domain, and a CD3ζ signaling domain. Anti-tumor activity of the CAR-T cells was evaluated using a sub-therapeutic (FIG. 25A) or tumor clearance and rechallenge (FIG. 25B) mantle cell lymphoma (MCL) model involving the infusion (“inoculation”) of 5E5 JeKo-1 expressing luciferase into mice at day zero (0) and subsequently infusing 2.5E5 CAR-T cells (FIG. 25A; “low dose”) or 2.5E6 CAR-T cells (FIG. 25B; “high dose”) into the mice at day 7. Mice administered the Roquin-1 KO CAR-T cells at the low dose showed increased reductions in levels of the JeKo-1 cells relative to CAR-T cells expressing Roquin-1 (FIG. 25A). Mice previously administered the Roquin-1 KO CAR-T cells at the high dose at day 7 and then re-inoculated with JeKo-1 cells at about day 40 (i.e., about 33 days following administration of the CAR-T cells) also showed increased reductions in levels of the JeKo-1 cells relative to CAR-T cells expressing Roquin-1 (FIG. 25B).

[0532] The improved ability of the Roquin-1 knock-out (KO) CAR-T cells to clear tumors in the mice relative to unmodified CAR-T cells or CAR-T cells modified to knock-out expression of DGKz or FLI-1 was found to be independent of the co-stimulatory domain of the chimeric antigen receptors expressed by the cells. For example, Roquin-1 KO CAR-T cells expressing a CAR polypeptide containing an anti-CD19 scFv as an antigen-binding domain, a CD28 costimulatory domain rather than the 4-1BB costimulatory domain used in the above in vivo experiment, and a CD3ζ signaling domain also showed improved ability to clear tumors in mice (FIGS. 26A and 26B). Anti-tumor activity of the CAR-T cells was evaluated using a sub-therapeutic mantle cell lymphoma (MCL) model involving the infusion (“inoculation”) of 5E5 JeKo-1 cells expressing luciferase into mice at day zero (0) and subsequently infusing 2.5E5 CAR-T cells (“low dose”) into the mice at day 7. Mice administered the Roquin-1 KO CAR-T cells showed increased reductions in levels of the JeKo-1 cells relative to CAR-T cells expressing Roquin-1 (FIGS. 26A and 26B).

[0533] An experiment as described in FIG. 27 and Table 10 was undertaken to demonstrate improved expansion kinetics (i.e., increased rates of proliferation) and increased cytokine secretion levels for T cells expressing a chimeric antigen receptor (CAR) polypeptide modified as described in Example 1 to knock-out expression of Roquin-1 or DGKz relative to cells expressing Roquin-1 and DGKz. The chimeric antigen receptor polypeptides contained an anti-CD19 scFv as an antigen-binding domain, a 4-1BB costimulatory domain, and a CD3ζ signaling domain. Peak CAR T cell expansion was detected between 7 and 10 days following administration of the CAR T cells to the mice (FIG. 28). CAR T cell expansion kinetics correlated with detected tumor burden in vivo (FIG. 29). The Roquin-1 KO CAR-T cells also maintained the central memory phenotype over time (FIG. 30) more than CAR-T cells expressing Roquin-1.

TABLE 10
Description of groups of mice evaluated.

| | | | | | | Guide | |
|---|---|---|---|---|---|---|---|
| | | | | | | RNAs Used | |
| | | | | | | to Edit the | |
| | | | | | | Cells to | |
| | | | | | | Knock-Out | |
| | | | | | Target | Expression | |
| | Tumor | Tumor Cells | Number | | Gene | of the | CAR+ Cells |
| | Cell | Administered | of Mice | | Knocked | Target | Administered |
| Group | Line | Per Mouse | (N) | CAR³ | Out | Gene | Per Mouse |
| 1A | JeKo-1 | 5E+5 | 5 | 19BBz | — | — | 5E+5 |
| 1B | JeKo-1 | 5E+5 | 5 | 19BBz | — | — | 5E+5 |
| 2A | JeKo-1 | 5E+5 | 5 | 19BBz | Roquin-1 | EF08 | 5E+5 |
| 2B | JeKo-1 | 5E+5 | 5 | 19BBz | Roquin-1 | EF08 | 5E+5 |
| 3A | JeKo-1 | 5E+5 | 5 | 19BBz | DGKz | EF54 | 5E+5 |
| 3B | JeKo-1 | 5E+5 | 5 | 19BBz | DGKz | EF54 | 5E+5 |
| 4A | JeKo-1 | 5E+5 | 5 | 19BBz | — | — | 2.5E+6 |
| 4B | JeKo-1 | 5E+5 | 5 | 19BBz | — | — | 2.5E+6 |
| 5A | JeKo-1 | 5E+5 | 5 | 19BBz | Roquin-1 | EF08 | 2.5E+6 |
| 5B | JeKo-1 | 5E+5 | 5 | 19BBz | Roquin-1 | EF08 | 2.5E+6 |
| 6A | JeKo-1 | 5E+5 | 5 | 19BBz | DGKz | EF54 | 2.5E+6 |
| 6B | JeKo-1 | 5E+5 | 5 | 19BBz | DGKz | EF54 | 2.5E+6 |
| 7 | JeKo-1 | 5E+5 | 5 | UTD | n/a | n/a | 2.5E+6 |

³The term “19BBz” indicates a chimeric antigen receptor (CAR) polypeptide containing an anti-CD19 scFv as an antigen-binding domain, a 4-1BB costimulatory domain, and a CD3ζ signaling domain. The term “UTD” indicates untransduced cells that do not express any CAR polypeptide.

[0534] Experiments were undertaken to demonstrate that knock-out of Roquin-1 expression in CAR-T cells led to an increase in expression of activation markers (e.g., OX40, CD25), co-stimulatory signals (e.g., ICOS, CD28), and secretion of cytokines (e.g., IL-2, IFNγ, and TNFα) relative to CAR-T cells expressing Roquin-1 or expressing Roquin-1 and modified as described in Example 1 to knock-out expression of DGKz or FLI-1. The CAR-T cells expressed a chimeric antigen receptor containing an anti-CD19 scFv as an antigen-binding domain, a 4-1BB costimulatory domain, and a CD3ζ signaling domain. When the Roquin-1 CAR-T cells were co-cultured for 24-hours with JeKo-1 cells following being stimulated through exposure to antigen 4 times, the Roquin-1 CAR-T cells showed increased expression of the activation markers OX40 (FIGS. 33A and 33B) and CD25 (FIGS. 33C and 33D) and of the T cell co-stimulatory signals ICOS (FIGS. 34A and 34B) and CD28 (FIGS. 34C and 34D) relative to the CAR-T cells expressing Roquin-1 or expressing Roquin-1 and modified to knock-out expression of DGKz or FLI-1. OX40 signaling promotes T cell division and cytokine production, and CD25 expression is associated with T cell growth and proliferation. Inducible T-cell costimulatory (ICOS) is an inducible co-stimulator expressed on activated CD4+ T cells, and cluster of differentiation 28 (CD28) acts as a major co-stimulatory receptor in promoting activation of naïve T cells. When the Roquin-1 CAR-T cells were co-cultured for 24-hours with Raji cells following being stimulated through exposure to antigen either 1 or 5 times, the Roquin-1 CAR-T cells showed increased expression of the cytokines IL-2 (FIGS. 35A to 35C), interferon gamma (IFNγ) (FIGS. 36A to 36C), and TNF-alpha (FIGS. 37A and 37B) relative to the CAR-T cells expressing Roquin-1.

[0535] The above-described experiments establish knock-out of expression of Roquin-1 as an effective strategy for reducing susceptibility of CAR-T cells to developing an exhausted phenotype after continuous or multiple antigen exposures and/or improving the efficacy of the CAR-T cells in killing target cells in vitro and/or in vivo.

### Example 3: Disruption of Roquin-1 Expression in Immune Cells Using Prime Editing

[0536] A prime editor construct together with a paired prime editing guide RNA (pegRNA), with or without a secondary nicking guide RNA (nRNA), may be used to induce targeted, programmable changes to genomic DNA. These targeted changes may involve frameshift insertion/deletion (indel) mutations resulting in a premature stop codon that disrupts endogenous expression of Roquin-1 in allogeneic human immune cells (e.g. T cells). Alternatively, or additionally, these targeted changes may involve transversion and/or transition mutations that may disrupt endogenous expression of Roquin-1 in allogeneic human immune cells (e.g., T cells) through various mechanisms, such as splice site disruption, start site disruption, active site disruption, promoter or enhancer disruption, protein structure disruption, or stop codon insertion. Additional mutations may be encoded into the pegRNA to increase the frequency or product purity of a mutation introduced to a polynucleotide using prime editing. Methods for editing polynucleotide sequences using prime editing are well known in the art (see, e.g., Petrova I O, Smirnikhina S A. The Development, Optimization and Future of Prime Editing. Int J Mol Sci. 2023 Dec. 1; 24(23):17045. doi: 10.3390/ijms242317045, the disclosure of which is incorporated herein in its entirety by reference for all purposes).

[0537] The pegRNA and/or nRNA sequences each contain a spacer selected from one or more of the following: CCUAAAGUUAAUUAUGUACC (SEQ ID NO: 876), GGAUGCCAGUUCCUUGGACC (SEQ ID NO: 877), GCUAGGGGAUGCCAGUUCCU (SEQ ID NO: 878), UGGGCAGCAGUAAGGGCUAG (SEQ ID NO: 879), and UUGGGCAGCAGUAAGGGCUA (SEQ ID NO: 880). The pegRNAs contain the following scaffold sequence:

(SEQ ID NO: 881)
GUUUUAGAGCUAGAAAUAGCAAGUUAAAAUAAGGCUAGUCCGUUAUCAA
CUUGAAAAAGUGGCACCGAGUCGGUGC.

[0538] Experiments are undertaken to disrupt expression of Roquin-1 in T cells. Primary human T cells are first cultured at 10⁶ cells/mL in complete medium comprising ImmunoCult™ XF T Cell Expansion Medium (Stem-Cell Technologies), 1% Penicilin-Streptomycin, 2 mM GlutaMax™ and 25 mM HEPES Buffer (Life Technologies), and 5% CTS™ ImmuneCell SR (ThermoFisher). The complete medium also contains 5 ng/mL human IL-15 (Biolegend) and 10 ng/mL IL-7 (Biolegend). T cells are stimulated with ImmunoCult Human CD3/CD28/CD2 T Cell Activator (Stem-Cell Technologies) following the manufacturer's instructions and then incubated at 37° C., 5% CO² and 95% humidity. Two-days post-activation, T cells are counted, washed with sterile PBS (Gibco) and resuspended in P3 buffer (Lonza) at 10⁷ cells/mL. T cells are electroporated with 1 mg of Roquin-1-specific pegRNA (see Table 14), 0.5 mg of Roquin-1-specific nRNA (see Table 15) and 2 mg of mRNA encoding the prime editor construct per 10⁶ cells using the Lonza 4D Nucleofector system (program DH-102). T cells are allowed to recover in complete medium at 10⁶ cells/mL and medium is exchanged every other day to adjust T cell concentration to 5×10⁵ cells mL⁻¹ until day 10 when cells are cryopreserved in CS10 for later analysis.

[0539] The following methods were employed in the above examples.

### Repeated Antigen Stimulation

[0540] Cells were exposed to antigen multiple times according to the method shown in FIG. 3A. Specifically, a recombinant human CD19 (rhCD19) antigen-coated plate used to stimulate the CAR-T cells was prepared at day −1 either by contacting anti-his-tag coated plate wells overnight at 4° C. with a 5 ng/μL solution of human CD19 his-tag recombinant protein available from Thermo Fisher (50 μL per well of a 96-well plate, 180 μL per well of a 48-well plate, 300 μL per well of a 24-well plate, 550 μL per well of a 12-well plate, or 1.5 mL per well of a 6-well plate), or by contacting anti-Fc coated plate wells overnight at 4° C. with a 5 ng/μL solution of recombinant human CD19-Fc chimera (carrier-free) available from BioLegend (50 μL per well of a 96-well plate, 180 μL per well of a 48-well plate, 300 μL per well of a 24-well plate, 550 μL per well of a 12-well plate, or 1.5 mL per well of a 6-well plate). CAR-T cells in XF Base Medium and pre-counted using either a NucleoCounter® NC-200™ automated cell analyzer or using a NucleoCounter® NC-250™ (8-channel) where the cells were stained using an acridine orange/propidium iodide viability stain, were added to the rhCD19 antigen-coated plate. The following cell culture volumes and total cell counts were added to wells for each of the following plate types: 96-well plate wells were loaded with about 5e4 total cells in 200 μL media; 48-well plate wells were loaded with about 1.8e-5 cells in about 400 μL media; 24-well plate wells were loaded with about 3e5 cells in about 1 mL media; 12-well plate wells were loaded with about 6e5 cells in about 2 mL media; and 6-well plate wells were loaded with about 2e6 cells in 4 mL media. The cells were then cultured in the rhCD19 antigen-coated plate wells until day 3, at which time the cells were either transferred to a newly-prepared recombinant human CD19 antigen-coated plate well prepared as described above starting on the previous day (i.e., day 2), or evaluated in an experiment as described above. Cells were transferred to a newly-prepared antigen-coated plate every three days, as appropriate, until the cells were exposed to the CD19 antigen the number of times desired.

### XF Base Medium

[0541] XF Base Medium was prepared by combining 500 mL ImmunoCult™ XF media from STEMCELL™ Technologies, 25 mL CTS™ supplement, 5 mL GlutaMAX™ supplement, and 5 mL of a HEPES buffer. The XF Base Medium was sterilized using filtration.

### Base Editing of Human T Cells

[0542] To base edit human T cells, 1 mL of frozen primary human T cells in a cryo tube were thawed on day 1 in a 37° C. water bath and transferred to a 15-mL conical tube containing 9 mL cell media (XF Base Medium). The cells were then spun at 500×g for 5 minutes and the cell media was removed from the resulting cell pellet. The cell pellet was resuspended in 10 mL media and the number of cells in the media was then determined. The cells were placed in a T75 flask and incubated overnight. Then, on day 2, the number of cells in the media was again determined and the concentration of the cells in the media was adjusted to be approximately 1e6 cells/mL. The cells were then activated using 26 25 μL of a commercially available ImmunoCult™ CD3/CD28/CD2 T cell activator media supplement for activation of T cells per 1 mL of cell media. Interleukin-7 (IL-7) and interleukin-15 (IL-15) were both then added to the cell media. The cells were incubated in the cell media and the cells were counted on day 5. On day 5 the cells were electroporated. The cells were electroplated using cuvettes or wells containing a maximum total cell count of about 5e+6 (cuvette) or 1e+6 (well) cells, 2 μg/μL each of mRNA (5 μL total for cuvette and 1 μL total for well) encoding a base editor and a guide RNA molecule (2.5 μL total for cuvette and 0.5 μL total for well), and P3 electroporation buffer. The cells electroporated using a commercially available electroporation device and fresh media was then added to the electroporated cells along with IL-7 and IL-15. Subsequently, IL-7 and IL-15 was added to the cell media every 2-3 days.

### Cell Lysis and Protein Quantitation

[0543] Cells were lysed for Western Blotting (WB) using a lysis solution containing a commercially available Radio-Immunoprecipitation Assay (RIPA) Lysis and Extraction Buffer and a phosphatase inhibitor cocktail. To lyse the cells, about 1-5e+6 cells washed once using phosphate buffer solution were resuspended in about 100-500 μL of the lysis solution and incubated on ice for about 30 minutes. In some cases, lysis was accelerated by performing about three freeze-thaw cycles of the cells suspended in the lysis solution using dry ice. The lysed cells were then centrifuged at 14,000×g for about 10 minutes. The resulting supernatant was transferred to a clean tube and stored at −20° C. for later use.

[0544] Protein concentrations were measured using a commercially available Pierce™ 660 nm protein assay, which is a rapid ready-to-use colorimetric method for measuring protein concentration.

### Measurement of Cytokine Secretion Levels

[0545] Cytokine secretion levels (i.e., levels of GZMB, IFNg, IL-2, and/or TNFa) were measured using the commercially available Ella™ system from BioAgilytix Labs, LLC for conducting microfluidics-based immunoassays. To measure cytokine secretion levels, at day −1, about 1e5 antigen-positive tumor cells were co-cultured in a wells with about 1e5 CAR+ T cells in triplicate. The total volume of each co-culture was about 200 μL. The cells were cultured in XF Base Medium. The co-cultures were incubated for about 24 hours. At day 0, the wells were spun at 500g for 5 minutes and the Ella™ system was used according to the manufacturer's protocols to quantify cytokine levels in the resulting supernatant.

### Flow Cytometry Stain Protocol

[0546] Flow cytometry was used to characterize base editing efficiency (e.g., reduced or eliminated target protein expression), cell identity (e.g., percentage of cells remaining in culture within various lymphocyte and monocyte compartments), chimeric antigen receptor (CAR) expression (e.g., percentage of T cells expressing a CAR), memory phenotype, and/or activation state (e.g., percentage of cells upregulating CD25 and CD69) in T cells. First, cells were counted using a NucleoCounter NC-200™ automated cell counter. Then, between about 2e5 and 1e6 cells to be evaluated were transferred to a well of a 96-well plate. The plate was then spun down at 500×g for about 5 minutes and the supernatant was removed. The cells were then washed in about 200 μL of flow cytometry staining buffer (FACS Buffer containing phosphate buffered saline and 2% fetal bovine serum). The cells were then stained using a near-infra red (NIR) live/dead stain followed by staining using one or more (e.g., panels) fluorochrome-labeled antibodies described in Table 11. The antibody-stained cells were then fixed using paraformaldehyde and subsequently evaluated using a MACSQuant™ Analyzer 16 flow cytometer. In some cases, compensation was carried out using CultraComp eBeads™ by combining 1 μL of antibody with 1 drop of UltraComp eBeads following by fixing using paraformaldehyde.

TABLE 11
Description of antibodies and fluorochromes linked thereto
used to immunostain cells for flow cytometry.

| Antibody Target | |
|---|---|
| Polypeptide | Fluorochrome |
| B2M | PE |
| CCR7 | APC |
| CD14 | VioBlue |
| CD19 | PE |
| CD2 | PEVio770 |
| CD25 | APC |
| CD27 | BV605 |
| CD4 | VioBright 515 |
| CD4 | BV510 |
| CD45 | VioGreen |
| CD45RA | VioBlue |
| CD5 | APC |
| CD5 CAR | FITC |
| CD52 | PE |
| CD56 | VioBright 667 |
| CD62L | PE |
| CD69 | VioBlue |
| CD8 | PerCPVio700 |
| CD8 | BV650 |
| EGFR | PE-Cy7 |
| GM-CSF | BV421 |
| GzmB | PE-CF594 |
| HLADR | BV421 |
| IFNg | PE |
| IL-2 | APC |
| PD1 (CD279) | VioBright 515 |
| Perforin | PerCP-Cy5.5 |
| TCRab | PerCPVio700 |
| TNFa | BV605 |

[0547] The following representative flow cytometry gating strategies were used:

### To Characterize Cell Identity

[0548] 1. All Cells→Single Cells→CD45+→Live/Dead (L/D)→CD56−→CD2+→Report CD2+% of CD45+CD56− cells
[0549] 2. All Cells→Single Cells→CD45+→L/D→CD56−→CD2+→CD4/CD8→Report CD4/CD8 split of CD2+ cells
[0550] 3. All Cells→Single Cells→CD45+→L/D→CD56+→Report CD56+% of Live CD45+ cells
[0551] 4. All Cells→Single Cells→CD45+→L/D→CD14+→Report CD14+% of Live CD45+ cells
[0552] 5. All Cells→Single Cells→CD45+→L/D→CD19+→Report CD19+% of Live CD45+ cells

### To Characterize Editing Efficiency

[0553] 1. All Cells→Single Cells→CD45+→L/D→CD2+→TCRab+→Report TCRab+% of CD2+ cells
[0554] 2. All Cells→Single Cells→CD45+→L/D→CD2+→CD7+→Report CD7+% of CD2+ cells
[0555] 3. All Cells→Single Cells→CD45+→L/D→CD2+→CD52+→Report CD52+% of CD2+ cells
[0556] 4. All Cells→Single Cells→CD45+→L/D→CD2+→PD1+→Report PD1+% of CD2+ cells

### To Characterize CAR Expression

[0557] 1. All Cells→Single Cells→CD45+→L/D→CD7 FITC+→Report CAR+% of Live CD45+ cells
[0558] 2. All Cells→Single Cells→CD45+→L/D→CD8/CD7 FITC→Report CAR+% of CD8+ cells

### To Characterize T Cell Activation

[0559] 1. All Cells→Single Cells→CD45+→L/D→CD2+→CD25+→Report CD25+% of CD2+ cells
[0560] 2. All Cells→Single Cells→CD45+→L/D→CD2+→CD69+→Report CD69+% of CD2+ cells

### Preparation of Base Edited CAR-T Cells

[0561] Base edited chimeric antigen receptor (CAR) T cells were typically prepared as follows. On day −1 or day 0 T cells were thawed and subsequently activated using ImmunoCult™ CD3/CD28/CD2 T cell activator media supplement. On day 2, the T cells were counted and adjusted to a concentration of 1e6/mL. Then, 1 mL of the cell culture were added to a well of a 6-well plate and add to the cell culture poloxamer synperonic F108 and lentiviral particles containing a polynucleotide encoding a chimeric antigen receptor. The cells were subsequently incubated overnight and fresh XF Base Medium was then added to the well. On day 5 or day 6, the cells were base edited by electroporating the cells with mRNA encoding a base editor and a guide RNA, as described above. Cytokines were added to the cell media every 2-3 days. At day 12 or day 13, between about 50 k and 100 k cells were added to a 96-well U-bottom plate for pelleted and stored at −20° C. for later analysis using next-generation sequencing (NGS). The cells were also analyzed as described above using flow cytometry. Cells were cryopreserved in 100% CryoStor® CS10 freeze media or in a composition containing 50% PlasmaLyte and 40% 100% CryoStor® CS10 freeze media.

### CAR-T Cell Cytotoxicity Assays

[0562] Cytotoxicity of T cells was evaluated using an IncuCyte® live-cell analysis system for real-time quantitative live-cell imaging and analysis that enabled visualization and quantitation of cell behavior over time by automatically gathering and analyzing images within a laboratory incubator. At day −1, 50 μL of poly-L-ornithine (0.01%) was added to each well of a 96-well plate and incubated at room temperature for 30 minutes. Then, the poly-L-omithine (a coating used to enhance cell attachment and adhesion to surfaces) solution was removed from the plate and the plate was allowed to dry at room temperature for 30 minutes. Then, 100 μL of cell culture media (XF Base Medium) containing antigen-positive tumor cells (e.g., about 20,000 cells) was added to wells of the 96-well plate. The plate was then placed into the IncuCyte® live-cell analysis system and the system was programmed to take four images of green fluorescent protein (GFP) expression in each well every three hours. At day 0, about 100 μL of cell culture media containing CAR-T cells (e.g., about 4e3 cells) was added to the wells containing the antigen-positive tumor cells. Each condition was evaluated in triplicate. The 96-well plate was then added back to the IncuCyte® live-cell analysis system programmed to take four images of green fluorescent protein (GFP) expression in each well every three hours.

[0563] Cytotoxicity of CAR-T cells was also measured by measuring luciferase activity in target antigen-positive tumor cells. Co-cultures were prepared in 96-well plates. Each co-culture had a total volume of about 200 μL and contained a total of about 50 k or 100 k target cells. The co-cultures were incubated and luminescence was measured at 24 hr, 48 hr, and 72 hr by adding D-luciferin to the co-cultures to be evaluated at each time point, incubating the resulting mixtures for 10 minutes at 37° C. and subsequently measuring luminescence using a spectrophotometer commercially available from Tecan.

### Intracellular Cytokine Staining

[0564] Intracellular cytokine staining was used to measure cytokine/chemokine expression in CAR-T cells (effector cells) that were stimulated in vitro by being co-cultured in wells for about 6-hours with antigen-positive tumor cells (target cells) according to the following protocol. First, co-cultures were prepared containing about 1.5e5 cells/well of the effector cells and about 1.5e5 cells/well of the target cells. The final concentration of cells in the co-culture was about 1.5e6 cells/mL in complete medium containing no exogenous cytokines. The total volume of each co-culture was about 200 μL. As a positive control, some effector cells were cultured in the absence of the target cells and stimulated using a cell stimulation cocktail containing paramethoxyamphetamine (PMA) and ionomycin. To each cell culture was added an anti-CD107 antibody (CD107a) labeled using a BV650 fluorophore/dye. The cell cultures were then incubated for about 1 hour at 37° C. under 5% CO₂. Then, the protein transport inhibitors brefeldin A (Golgi Plug) and monesin (Golgi Stop) were added to each cell culture and the cells were incubated for between about 4 and 5 hours. The cells were stained using viability eFluor780 stain and labeled anti-CD4, CD8, and EGFR antibodies. The cells were then permeabilized using a FIX & PERM™ Cell Permeabilization Kit available from ThermoFisher Scientific and evaluated using flow cytometry, as described above, after immunostaining the cells to detect intracellular expression of the cytokines granulocyte-macrophage colony-stimulating factor (GM-CSF), interferon-gamma (INF-γ), tumor necrosis factor (TNF), interleukin-2 (IL-2), and granzyme B (GzmB).

### Western Blots

[0565] For evaluation of protein expression using Western blots, lysed cell supernatant samples were first prepared as described above. The supernatant samples were then denatured by adding dithiothreitol (DTT) to each sample and incubating for 5 min at 95° C. The denatured samples were then combined with primary antibodies specific for a target antigen of interest and for a control target antigen (e.g., β-actin/GAPDH). The samples were then combined with a secondary antibody (e.g., anti-rabbit antibody linked to horseradish peroxidase (HRP) and/or anti-mouse antibody linked to a near-infra red (NIR) dye). The immunostained samples were then evaluated using chemiluminescence and/or fluorescence detection using a Jess™ instrument for size-based automated capillary Western blot assays.

### Amino Acid and Nucleotide Sequences for the Anti-CD19 Chimeric Antigen Receptors

[0566] An amino acid sequence of the anti-CD19 chimeric antigen receptor (CAR) used in the Examples is provided below. An amino acid sequence of the CAR fused by way of a self-cleaving polypeptide to an epidermal growth factor receptor (EGFR) tag and alternatively referred to as “LV224” is also provided below. In the below amino acid sequences, T-cell surface glycoprotein CD8 alpha chain signal peptides are indicated by BOLD-UNDERLINED UPPERCASE TEXT, an immunoglobulin light chain variable region is indicated by DOUBLE-UNDERLINE ALL CAPS TEXT, linkers are indicated by bold text, an immunoglobulin heavy chain variable region is indicated by DOUBLE-UNDERLINE BOLD ALL CAPS TEXT, a CD8a hinge domain is indicated by double-underlined text, a CD8a transmembrane domain is indicated by bold italic text, a 4-1BB costimulatory domain is indicated by underlined text, a CD3z domain is indicated by bold-dash-underlined text, a T2A self-cleaving peptide is indicated by bold lowercase text, an epidermal growth factor receptor tag is indicated by lowercase plain text.
[0567] Anti-CD19 CAR amino acid sequence:

(SEQ ID NO: 830)
MALPVTALLLPLALLLHAARPDIQMTQTTSSLSASLGDRVTISCRASQDISKYLNWYQQKPD
GTVKLLIYHTSRLHSGVPSRFSGSGSGTDYSLTISNLEQEDIATYDCQQGNTLPYTFGGGTK
LEITGGGGSGGGGSGGGGSEVKLQESGPGLVAPSQSLSVTCTBSGVSLPDYGVSWIRQPPPK
GLEWLGVIWGSETTYYNSALKSRLTIIKDNSKSQVFLKMNSLQTDDTAIYYCAKHYYYGGSY
AMDYWGQGTSVTVSSTTTPAPRPPTPAPTIASQPLSLRPEACRPAAGGAVHTRGLDFACDIY
IWAPLAGTCGVLLLSLVITLYCKRGRKKLLYIFKQPFMRPVQTTQEEDGCSCRFPEEEEGGC

[chemical structure]

[chemical structure]

[0568] LV224 amino acid sequence:

(SEQ ID NO: 831)
MALPVTALLLPLALLLHAARPDIQMTQTTSSLSASLGDRVTISCRASQDISKYLNWYQQKPD
GTVKLLIYHTSRLHSGVPSRFSGSGSGTDYSLTISNLEQEDIATYFCQQGNTLPYTFGGGTK
LEITGGGGSGGGGSGGGGSEVKLQESGPGLVAPSQSLSVTCTBSGVSLPDYGVSWIRQPPPK
GLEWLGVIWGSETTYYNSALKSRLTIIKDNSKSQVFLKMNSLQTDDTAIYYCAKHYYYGGSY
AMDYWGQGTSVTVSSTTTPAPRPPTPAPTIASQPLSLRPEACRPAAGGAVHTRGLDFACDIY
IWAPLAGTCGVLLLSLVITLYCKRGRKKLLYIFKQPFMRPVQTTQEEDGCSCRFPEEEEGGC

[chemical structure]

[chemical structure]

tcgdveenpgpMALPVTALLLPLALLLHAARPGSrkvcngigigefkdslsinatnikhfkn
ctsisgdlhilpvafrgdsfthtppldpqeldilktvkeitgflliqawpenrtdlhafenl
eiirgrtkqhgqfslavvslnitslglrslkeisdgdviisgnknlcyantinwkklfgtsg
qktkiisnrgensckatgqvchalcspegcwgpeprdcvscrnvsrgrecvdkcnllegepr
efvenseciqchpeclpqamnitctgrgpdnciqcahyidgphcvktcpagvmgenntlvwk
yadaghvchlchpnctygctgpglegcptngpkipsiatgmvgalllllvvalgiglfm.

[0569] Representative nucleotide sequence encoding the anti-CD19 CAR:

(SEQ ID NO: 832)
ATGGCCCTGCCCGTTACCGCCCTACTCCTGCCCCTGGCCCTCCTGCTCCACGCCGCCAGGCC
CGACATCCAGATGACCCAGACCACCAGCAGCCTGTCCGCCAGCCTGGGGGACAGGGTGACCA
TCTCCTGTCGGGCCTCTCAGGACATCAGCAAGTACCTGAATTGGTACCAGCAGAAGCCTGAC
GGCACCGTGAAGCTGCTGATCTACCACACCAGCCGGCTGCACTCCGGCGTGCCCAGCCGGTT
CAGCGGCAGCGGGTCAGGCACCGACTACAGCCTGACCATCTCCAACCTGGAGCAGGAGGACA
TCGCCACCTACTTCTGCCAGCAGGGGAACACCCTGCCATACACCTTTGGCGGGGGCACCAAG
CTGGAGATCACCGGGGGGGGCGGGAGCGGCGGCGGCGGGTCCGGGGGGGGCGGCTCCGAGGT
GAAGCTGCAGGAGTCCGGCCCCGGACTGGTCGCCCCCTCCCAGAGCCTGTCCGTGACATGCA
CCGTGTCCGGCGTGAGCCTGCCCGACTACGGCGTGTCATGGATCAGGCAGCCCCCCCGGAAG
GGGCTGGAGTGGCTGGGGGTGATCTGGGGGAGCGAGACCACTTACTACAACAGTGCTCTCAA
GAGCAGGCTGACCATCATCAAGGACAACAGCAAGAGCCAGGTGTTCCTGAAGATGAACAGCC
TGCAGACCGATGACACCGCCATCTACTACTGTGCCAAGCACTACTACTATGGCGGCAGCTAC
GCCATGGACTACTGGGGGCAGGGGACAAGCGTGACTGTGAGCAGCACCACCACCCCTGCCCC
CAGGCCCCCCACCCCCGCCCCCACCATCGCCAGCCAGCCCCTGTCCCTGCGGCCCGAGGCCT
GCCGGCCCGCCGCCGGCGGCGCCGTGCACACCCGGGGCCTGGACTTCGCCTGCGACATCTAC
ATCTGGGCCCCCCTGGCCGGAACCTGCGGCGTGCTGCTGCTGTCCCTGGTGATCACCCTGTA
CTGCAAGCGGGGCCGGAAGAAGCTGCTGTACATCTTCAAGCAGCCCTTCATGCGCCCCGTGC
AGACCACCCAGGAGGAGGACGGCTGCAGCTGCAGGTTCCCCGAGGAGGAGGAGGGGGGCTGC
GAGCTGCGGGTGAAGTTCAGCAGGAGCGCCGACGCCCCTGCTTACCAGCAGGGCCAGAATCA
GCTGTACAACGAGCTGAATCTGGGCCGGAGGGAGGAGTACGACGTGCTGGACAAGCGGAGGG
GCAGGGACCCCGAGATGGGCGGCAAGCCCAGGCGGAAGAACCCCCAGGAGGGGCTGTACAAC
GAGCTGCAGAAGGACAAGATGGCCGAGGCCTACTCCGAGATCGGCATGAAGGGCGAGAGGCG
GAGAGGCAAGGGCCATGACGGCCTGTACCAGGGCCTGTCCACCGCCACCAAGGACACCTACG
ACGCCCTGCACATGCAGGCCCTGCCCCCCCGC.

[0570] Representative nucleotide sequence encoding LV224:

(SEQ ID NO: 833)
ATGGCCCTGCCCGTTACCGCCCTACTCCTGCCCCTGGCCCTCCTGCTCCACGCCGCCAGGCC
CGACATCCAGATGACCCAGACCACCAGCAGCCTGTCCGCCAGCCTGGGGGACAGGGTGACCA
TCTCCTGTCGGGCCTCTCAGGACATCAGCAAGTACCTGAATTGGTACCAGCAGAAGCCTGAC
GGCACCGTGAAGCTGCTGATCTACCACACCAGCCGGCTGCACTCCGGCGTGCCCAGCCGGTT
CAGCGGCAGCGGGTCAGGCACCGACTACAGCCTGACCATCTCCAACCTGGAGCAGGAGGACA
TCGCCACCTACTTCTGCCAGCAGGGGAACACCCTGCCATACACCTTTGGCGGGGGCACCAAG
CTGGAGATCACCGGGGGGGGGGGGAGCGGCGGCGGCGGGTCCGGGGGGGGCGGCTCCGAGGT
GAAGCTGCAGGAGTCCGGCCCCGGACTGGTCGCCCCCTCCCAGAGCCTGTCCGTGACATGCA
CCGTGTCCGGCGTGAGCCTGCCCGACTACGGCGTGTCATGGATCAGGCAGCCCCCCCGGAAG
GGGCTGGAGTGGCTGGGGGTGATCTGGGGGAGCGAGACCACTTACTACAACAGTGCTCTCAA
GAGCAGGCTGACCATCATCAAGGACAACAGCAAGAGCCAGGTGTTCCTGAAGATGAACAGCC
TGCAGACCGATGACACCGCCATCTACTACTGTGCCAAGCACTACTACTATGGCGGCAGCTAC
GCCATGGACTACTGGGGGCAGGGGACAAGCGTGACTGTGAGCAGCACCACCACCCCTGCCCC
CAGGCCCCCCACCCCCGCCCCCACCATCGCCAGCCAGCCCCTGTCCCTGCGGCCCGAGGCCT
GCCGGCCCGCCGCCGGCGGCGCCGTGCACACCCGGGGCCTGGACTTCGCCTGCGACATCTAC
ATCTGGGCCCCCCTGGCCGGAACCTGCGGCGTGCTGCTGCTGTCCCTGGTGATCACCCTGTA
CTGCAAGCGGGGCCGGAAGAAGCTGCTGTACATCTTCAAGCAGCCCTTCATGCGCCCCGTGC
AGACCACCCAGGAGGAGGACGGCTGCAGCTGCAGGTTCCCCGAGGAGGAGGAGGGGGGCTGC
GAGCTGCGGGTGAAGTTCAGCAGGAGCGCCGACGCCCCTGCTTACCAGCAGGGCCAGAATCA
GCTGTACAACGAGCTGAATCTGGGCCGGAGGGAGGAGTACGACGTGCTGGACAAGCGGAGGG
GCAGGGACCCCGAGATGGGCGGCAAGCCCAGGCGGAAGAACCCCCAGGAGGGGCTGTACAAC
GAGCTGCAGAAGGACAAGATGGCCGAGGCCTACTCCGAGATCGGCATGAAGGGCGAGAGGCG
GAGAGGCAAGGGCCATGACGGCCTGTACCAGGGCCTGTCCACCGCCACCAAGGACACCTACG
ACGCCCTGCACATGCAGGCCCTGCCCCCCCGCGGCAGCGGAGAGGGCAGAGGAAGTCTTCTA
ACATGCGGTGACGTGGAGGAGAATCCCGGCCCTATGGCCCTGCCTGTGACAGCTCTGCTGCT
TCCTCTGGCACTGCTGCTGCATGCTGCCAGACCAGGCAGCAGAAAAGTGTGCAACGGCATCG
GCATCGGAGAGTTCAAGGACAGCCTGAGCATCAACGCCACCAACATCAAGCACTTCAAGAAC
TGCACCAGCATCAGCGGCGACCTGCACATTCTGCCTGTGGCCTTTAGAGGCGACAGCTTCAC
CCACACACCTCCACTCGATCCCCAGGAGCTGGACATCCTGAAAACCGTGAAAGAGATCACCG
GCTTTCTGCTGATCCAGGCTTGGCCCGAGAACCGGACAGATCTGCACGCCTTCGAGAACCTG
GAAATCATCAGAGGCCGGACCAAGCAGCACGGCCAGTTTTCTCTGGCTGTGGTGTCCCTGAA
CATCACCAGCCTGGGCCTGAGAAGCCTGAAAGAAATCAGCGACGGCGACGTGATCATCTCCG
GCAACAAGAACCTGTGCTACGCCAACACCATCAACTGGAAGAAGCTGTTCGGCACCAGCGGC
CAGAAAACAAAGATCATCAGCAACCGGGGCGAGAACAGCTGCAAGGCTACAGGCCAAGTGTG
CCACGCTCTGTGTAGCCCTGAAGGCTGTTGGGGACCCGAGCCTAGAGATTGCGTGTCCTGCA
GAAACGTGTCCCGGGGCAGAGAATGCGTGGACAAGTGCAATCTGCTGGAAGGCGAGCCCCGC
GAGTTCGTGGAAAACAGCGAGTGCATCCAGTGTCACCCCGAGTGTCTGCCCCAGGCCATGAA
CATTACCTGTACCGGCAGAGGCCCCGACAACTGTATTCAGTGCGCCCACTACATCGACGGCC
CTCACTGCGTGAAAACATGTCCTGCTGGCGTGATGGGAGAGAACAACACCCTCGTGTGGAAG
TATGCCGACGCCGGACATGTGTGCCACCTGTGTCACCCTAATTGCACCTACGGCTGTACAGG
CCCTGGCCTGGAAGGCTGTCCAACAAACGGACCTAAGATCCCCTCTATCGCCACCGGCATGG
TTGGAGCCTTGCTGCTTCTGCTGGTGGTGGCCCTTGGCATCGGCCTGTTTATG.

[0571] Further amino acid and nucleotide sequences for chimeric antigen receptors (CARs) used in the Examples are provided in Tables 12 and 13.

TABLE 12
Amino acid sequences for chimeric antigen receptors (CARs) used in the
examples of the application.

| | CAR Domain | |
|---|---|---|
| | (listed from | |
| | top-to-bottom | |
| CAR | in order from | |
| Polypeptide | N-terminus to | |
| Description | C-terminus) | CAR Domain Amino Acid Sequence |
| Anti- | CD8a Leader | MALPVTALLLPLALLLHAARP (SEQ ID NO: 836) |
| CD19 | Peptide | |
| CAR | scFv | DIQMTQTTSSLSASLGDRVTISCRASQDISKYLNWYQQKPDGTVKL |
| with | | LIYHTSRLHSGVPSRFSGSGSGTDYSLTISNLEQEDIATYFCQQGN |
| CD28 | | TLPYTFGGGTKLEITGGGGSGGGGSGGGGSEVKLQESGPGLVAPSQ |
| co- | | SLSVTCTVSGVSLPDYGVSWIRQPPRKGLEWLGVIWGSETTYYNSA |
| stim | | LKSRLTIIKDNSKSQVFLKMNSLQTDDTAIYYCAKHYYYGGSYAMD |
| | | YWGQGTSVTVSS (SEQ ID NO: 837) |
| | CD8a Hinge | TTTPAPRPPTPAPTIASQPLSLRPEACRPAAGGAVHTRGLDFACD |
| | | (SEQ ID NO: 838) |
| | CD28 | FWVLVVVGGVLACYSLLVTVAFIIFWV (SEQ ID NO: 839) |
| | Transmembrane | |
| | CD28 | RSKRSRLLHSDYMNMTPRRPGPTRKHYQPYAPPRDFAAYRS (SEQ |
| | Intracellular | ID NO: 840) |
| | CD3 zeta | RVKFSRSADAPAYQQGQNQLYNELNLGRREEYDVLDKRRGRDPEMG |
| | | GKPRRKNPQEGLYNELQKDKMAEAYSEIGMKGERRRGKGHDGLYQG |
| | | LSTATKDTYDALHMQALPPR (SEQ ID NO: 841) |
| | tEGFR Tag | MALPVTALLLPLALLLHAARPGSRKVCNGIGIGEFKDSLSINATNI |
| | | KHFKNCTSISGDLHILPVAFRGDSFTHTPPLDPQELDILKTVKEIT |
| | | GFLLIQAWPENRTDLHAFENLEIIRGRTKQHGQFSLAVVSLNITSL |
| | | GLRSLKEISDGDVIISGNKNLCYANTINWKKLFGTSGQKTKIISNR |
| | | GENSCKATGQVCHALCSPEGCWGPEPRDCVSCRNVSRGRECVDKCN |
| | | LLEGEPREFVENSECIQCHPECLPQAMNITCTGRGPDNCIQCAHYI |
| | | DGPHCVKTCPAGVMGENNTLVWKYADAGHVCHLCHPNCTYGCTGPG |
| | | LEGCPTNGPKIPSIATGMVGALLLLLVVALGIGLFM (SEQ ID NO: |
| | | 842) |
| Anti- | CD8a Leader | MALPVTALLLPLALLLHAARP (SEQ ID NO: 843) |
| CD22 | Peptide | |
| CAR | scFv | QVQLQQSGPGLVKPSQTLSLTCAISGDSVSSNSAAWNWIRQSPSRG |
| | | LEWLGRTYYRSKWYNDYAVSVKSRITINPDTSKNQFSLQLNSVTPE |
| | | DTAVYYCAREVTGDLEDAFDIWGQGTMVTVSSGGGGSDIQMTQSPS |
| | | SLSASVGDRVTITCRASQTIWSYLNWYQQRPGKAPNLLIYAASSLQ |
| | | SGVPSRFSGRGSGTDFTLTISSLQAEDFATYYCQQSYSIPQTFGQG |
| | | TKLEIK (SEQ ID NO: 844) |
| | CD8a Hinge | TTTPAPRPPTPAPTIASQPLSLRPEACRPAAGGAVHTRGLDFACD |
| | | (SEQ ID NO: 845) |
| | CD8a | IYIWAPLAGTCGVLLLSLVITLYC (SEQ ID NO: 846) |
| | Transmembrane | |
| | 4-1BB | KRGRKKLLYIFKQPFMRPVQTTQEEDGCSCRFPEEEEGGCEL (SEQ |
| | Intracellular | ID NO: 847) |
| | CD3 zeta | RVKFSRSADAPAYQQGQNQLYNELNLGRREEYDVLDKRRGRDPEMG |
| | | GKPRRKNPQEGLYNELQKDKMAEAYSEIGMKGERRRGKGHDGLYQG |
| | | LSTATKDTYDALHMQALPPR (SEQ ID NO: 848) |
| | tEGFR Tag | MALPVTALLLPLALLLHAARPGSRKVCNGIGIGEFKDSLSINATNI |
| | | KHFKNCTSISGDLHILPVAFRGDSFTHTPPLDPQELDILKTVKEIT |
| | | GFLLIQAWPENRTDLHAFENLEIIRGRTKQHGQFSLAVVSLNITSL |
| | | GLRSLKEISDGDVIISGNKNLCYANTINWKKLFGTSGQKTKIISNR |
| | | GENSCKATGQVCHALCSPEGCWGPEPRDCVSCRNVSRGRECVDKCN |
| | | LLEGEPREFVENSECIQCHPECLPQAMNITCTGRGPDNCIQCAHYI |
| | | DGPHCVKTCPAGVMGENNTLVWKYADAGHVCHLCHPNCTYGCTGPG |
| | | LEGCPTNGPKIPSIATGMVGALLLLLVVALGIGLFM (SEQ ID NO: |
| | | 849) |
| Anti- | Signal Peptide | MLLLVTSLLLCELPHPAFLLIP (SEQ ID NO: 850) |
| ROR1 | scFv | QEQLVESGGRLVTPGGSLTLSCKASGFDFSAYYMSWVRQAPGKGLE |
| CAR | | WIATIYPSSGKTYYATWVNGRFTISSDNAQNTVDLQMNSLTAADRA |
| | | TYFCARDSYADDGALFNIWGPGTLVTISSGGGGSGGGGSGGGGSEL |
| | | VLTQSPSVSAALGSPAKITCTLSSAHKTDTIDWYQQLQGEAPRYLM |
| | | QVQSDGSYTKRPGVPDRFSGSSSGADRYLIIPSVQADDEADYYCGA |
| | | DYIGGYVFGGGTQLTVTG (SEQ ID NO: 851) |
| | CD8a | ESKYGPPCPPCPMFWVLVVVGGVLACYSLLVTVAFIIFWV (SEQ ID |
| | Hinge/ | NO: 852) |
| | Transmembrane | |
| | CD28 | RSKRSRLLHSDYMNMTPRRPGPTRKHYQPYAPPRDFAAYRS (SEQ |
| | Intracellular | ID NO: 853) |
| | CD3 zeta | RVKFSRSADAPAYQQGQNQLYNELNLGRREEYDVLDKRRGRDPEMG |
| | | GKPRRKNPQEGLYNELQKDKMAEAYSEIGMKGERRRGKGHDGLYQG |
| | | LSTATKDTYDALHMQALPPR (SEQ ID NO: 854) |
| | tEGFR Tag | MLLLVTSLLLCELPHPAFLLIPRKVCNGIGIGEFKDSLSINATNIK |
| | | HFKNCTSISGDLHILPVAFRGDSFTHTPPLDPQELDILKTVKEITG |
| | | FLLIQAWPENRTDLHAFENLEIIRGRTKQHGQFSLAVVSLNITSLG |
| | | LRSLKEISDGDVIISGNKNLCYANTINWKKLFGTSGQKTKIISNRG |
| | | ENSCKATGQVCHALCSPEGCWGPEPRDCVSCRNVSRGRECVDKCNL |
| | | LEGEPREFVENSECIQCHPECLPQAMNITCTGRGPDNCIQCAHYID |
| | | GPHCVKTCPAGVMGENNTLVWKYADAGHVCHLCHPNCTYGCTGPGL |
| | | EGCPTNGPKIPSIATGMVGALLLLLVVALGIGLFM (SEQ ID NO: |
| | | 855) |

TABLE 13
Nucleotide sequences for chimeric antigen receptors (CARs) used in the
examples of the application.

| | CAR Domain (listed | |
|---|---|---|
| CAR | from top-to-bottom in | |
| Polypeptide | order from 5′ end to | |
| Description | 3′ end) | Nucleotide Sequence |
| Anti-CD19 | CD8a Leader Peptide | ATGGCCCTGCCCGTGACCGCCCTGCTGCTGCCCCTGGCCC |
| CAR with | scFv | TGCTGCTGCACGCCGCCAGGCCC (SEQ ID NO: 856) |
| CD28 co- | | GACATCCAGATGACCCAGACTACCAGCTCCCTGAGCGCCA |
| stim | | GTCTGGGCGATCGGGTGACCATCAGCTGCAGGGCCAGCCA |
| | | GGACATCTCCAAGTACCTGAATTGGTACCAACAGAAACCC |
| | | GACGGCACCGTGAAGCTGCTGATCTACCACACCTCTAGGC |
| | | TGCACAGCGGGGTGCCCAGCCGCTTCAGCGGAAGTGGCAG |
| | | TGGCACCGACTACTCCCTGACCATCAGCAACCTGGAGCAG |
| | | GAGGACATTGCCACCTACTTCTGCCAGCAGGGCAACACCC |
| | | TGCCCTACACCTTCGGCGGCGGCACCAAGCTGGAGATCAC |
| | | AGGCGGGGGCGGCTCTGGCGGGGGCGGCAGCGGGGGCGGG |
| | | GGCTCCGAGGTGAAGCTGCAGGAGTCCGGCCCCGGCCTGG |
| | | TGGCCCCCAGCCAGAGCCTGTCCGTGACCTGTACCGTGTC |
| | | CGGGGTGTCCCTGCCCGACTATGGCGTGAGCTGGATCCGC |
| | | CAGCCACCCAGGAAGGGCCTGGAGTGGCTGGGCGTGATCT |
| | | GGGGCAGCGAGACCACCTACTACAATAGCGCCCTGAAGAG |
| | | CAGGCTGACCATCATCAAGGACAACAGCAAGAGCCAGGTG |
| | | TTCCTGAAGATGAACAGCCTGCAGACCGACGACACCGCCA |
| | | TCTACTACTGTGCCAAGCACTACTACTATGGCGGCAGCTA |
| | | CGCCATGGACTACTGGGGGCAGGGCACCTCCGTGACCGTG |
| | | AGTAGC (SEQ ID NO: 857) |
| | CD8a Hinge | ACCACCACCCCAGCACCCCGCCCACCCACCCCAGCCCCAA |
| | | CAATCGCAAGCCAGCCCCTGTCCCTGCGGCCCGAGGCCTG |
| | | CCGGCCCGCCGCCGGCGGCGCCGTGCACACCAGGGGCCTG |
| | | GACTTCGCTTGCGAT (SEQ ID NO: 858) |
| | CD28 Transmembrane | TTTTGGGTGCTGGTGGTGGTGGGCGGGGTGCTGGCCTGCT |
| | | ACTCCCTGCTGGTGACCGTGGCCTTCATCATCTTCTGGGT |
| | | G (SEQ ID NO: 859) |
| | CD28 Intracellular | CGCTCCAAGCGGAGCAGGCTGCTGCACAGCGACTACATGA |
| | | ACATGACACCCAGAAGACCCGGCCCCACACGGAAGCATTA |
| | | CCAGCCCTACGCCCCTCCCCGCGACTTCGCCGCCTACCGG |
| | | AGC (SEQ ID NO: 860) |
| | CD3 zeta | CGGGTGAAGTTCAGCCGCTCCGCCGATGCCCCTGCCTACC |
| | | AGCAGGGGCAGAATCAGCTGTACAACGAGCTGAACCTGGG |
| | | CCGGCGCGAGGAGTACGACGTGCTGGACAAGCGCCGGGGC |
| | | CGCGACCCAGAGATGGGCGGCAAGCCCCGGCGGAAGAATC |
| | | CCCAGGAGGGCCTGTACAACGAGCTCCAGAAGGACAAGAT |
| | | GGCCGAGGCCTACAGCGAGATCGGCATGAAGGGCGAGCGG |
| | | AGACGCGGGAAGGGGCACGACGGCCTGTACCAGGGCCTGT |
| | | CCACCGCCACCAAGGACACCTACGACGCCCTGCACATGCA |
| | | GGCCCTGCCCCCCCGC (SEQ ID NO: 861) |
| | tEGFR Tag | ATGGCCCTGCCTGTGACAGCTCTGCTGCTTCCTCTGGCAC |
| | | TGCTGCTGCATGCTGCCAGACCAGGCAGCAGAAAAGTGTG |
| | | CAACGGCATCGGCATCGGAGAGTTCAAGGACAGCCTGAGC |
| | | ATCAACGCCACCAACATCAAGCACTTCAAGAACTGCACCA |
| | | GCATCAGCGGCGACCTGCACATTCTGCCTGTGGCCTTTAG |
| | | AGGCGACAGCTTCACCCACACACCTCCACTCGATCCCCAG |
| | | GAGCTGGACATCCTGAAAACCGTGAAAGAGATCACCGGCT |
| | | TTCTGCTGATCCAGGCTTGGCCCGAGAACCGGACAGATCT |
| | | GCACGCCTTCGAGAACCTGGAAATCATCAGAGGCCGGACC |
| | | AAGCAGCACGGCCAGTTTTCTCTGGCTGTGGTGTCCCTGA |
| | | ACATCACCAGCCTGGGCCTGAGAAGCCTGAAAGAAATCAG |
| | | CGACGGCGACGTGATCATCTCCGGCAACAAGAACCTGTGC |
| | | TACGCCAACACCATCAACTGGAAGAAGCTGTTCGGCACCA |
| | | GCGGCCAGAAAACAAAGATCATCAGCAACCGGGGCGAGAA |
| | | CAGCTGCAAGGCTACAGGCCAAGTGTGCCACGCTCTGTGT |
| | | AGCCCTGAAGGCTGTTGGGGACCCGAGCCTAGAGATTGCG |
| | | TGTCCTGCAGAAACGTGTCCCGGGGCAGAGAATGCGTGGA |
| | | CAAGTGCAATCTGCTGGAAGGCGAGCCCCGCGAGTTCGTG |
| | | GAAAACAGCGAGTGCATCCAGTGTCACCCCGAGTGTCTGC |
| | | CCCAGGCCATGAACATTACCTGTACCGGCAGAGGCCCCGA |
| | | CAACTGTATTCAGTGCGCCCACTACATCGACGGCCCTCAC |
| | | TGCGTGAAAACATGTCCTGCTGGCGTGATGGGAGAGAACA |
| | | ACACCCTCGTGTGGAAGTATGCCGACGCCGGACATGTGTG |
| | | CCACCTGTGTCACCCTAATTGCACCTACGGCTGTACAGGC |
| | | CCTGGCCTGGAAGGCTGTCCAACAAACGGACCTAAGATCC |
| | | CCTCTATCGCCACCGGCATGGTTGGAGCCTTGCTGCTTCT |
| | | GCTGGTGGTGGCCCTTGGCATCGGCCTGTTTATG (SEQ |
| | | ID NO: 862) |
| Anti-CD22 | CD8a Leader Peptide | ATGGCCCTTCCAGTAACTGCCCTTCTGTTGCCACTTGCTC |
| CAR | scFv | TTCTCCTTCACGCGGCGCGCCCA (SEQ ID NO: 863) |
| | | CAGGTGCAGCTGCAGCAGAGCGGCCCGGGCCTGGTGAAAC |
| | | CGAGCCAGACCCTGAGCCTGACCTGCGCGATTAGCGGCGA |
| | | TAGCGTGAGCAGCAACAGCGCGGCGTGGAACTGGATTCGC |
| | | CAGAGCCCGAGCCGCGGCCTGGAATGGCTGGGCCGCACCT |
| | | ATTATCGCAGCAAATGGTATAACGATTATGCGGTGAGCGT |
| | | GAAAAGCCGCATTACCATTAACCCGGATACCAGCAAAAAC |
| | | CAGTTTAGCCTGCAGCTGAACAGCGTGACCCCGGAAGATA |
| | | CCGCGGTGTATTATTGCGCGCGCGAAGTGACCGGCGATCT |
| | | GGAAGATGCGTTTGATATTTGGGGCCAGGGCACCATGGTG |
| | | ACCGTGTCGTCCGGCGGAGGCGGGTCAGATATTCAGATGA |
| | | CCCAGTCACCCAGTTCACTCTCTGCGTCCGTTGGAGATAG |
| | | AGTCACAATTACATGTCGCGCGAGCCAGACGATTTGGAGT |
| | | TACCTCAATTGGTATCAGCAGCGCCCGGGCAAAGCGCCGA |
| | | ACCTGCTGATTTATGCGGCGAGCAGCCTGCAGAGCGGCGT |
| | | GCCGAGCCGCTTTAGCGGCCGCGGCAGCGGCACCGATTTT |
| | | ACCCTGACCATTAGCAGCCTGCAGGCGGAAGATTTTGCGA |
| | | CCTATTATTGCCAGCAGAGCTATAGCATTCCGCAGACCTT |
| | | TGGCCAGGGCACCAAACTGGAAATTAAA (SEQ ID NO: |
| | | 864) |
| | CD8a Hinge | ACGACTACACCAGCTCCACGCCCGCCAACTCCAGCACCTA |
| | | CAATTGCATCACAACCTCTGAGCTTGAGGCCTGAGGCATG |
| | | TAGACCTGCCGCTGGAGGTGCTGTGCATACACGCGGACTG |
| | | GATTTTGCTTGCGAT (SEQ ID NO: 865) |
| | CD8a Transmembrane | ATTTATATTTGGGCCCCATTGGCTGGGACCTGCGGCGTCT |
| | | TGCTCCTGTCTCTTGTCATTACTTTGTATTGC (SEQ ID |
| | | NO: 866) |
| | 4-1BB Intracellular | AAGCGCGGAAGGAAAAAGTTGTTGTATATCTTTAAGCAAC |
| | | CCTTCATGCGCCCGGTTCAGACAACACAGGAAGAGGACGG |
| | | ATGCTCTTGTAGGTTTCCTGAGGAAGAAGAGGGCGGGTGC |
| | | GAACTC (SEQ ID NO: 867) |
| | CD3 zeta | AGAGTCAAATTTTCACGCTCCGCCGATGCACCTGCATACC |
| | | AGCAAGGGCAAAATCAACTGTACAACGAACTGAACCTCGG |
| | | CAGGCGGGAAGAATACGACGTGCTCGACAAACGACGCGGG |
| | | AGAGACCCCGAAATGGGTGGCAAACCCCGCCGGAAAAATC |
| | | CACAGGAGGGCTTGTATAACGAACTTCAAAAGGACAAGAT |
| | | GGCTGAAGCTTACTCAGAAATCGGTATGAAGGGAGAACGG |
| | | AGGCGCGGTAAAGGCCACGACGGATTGTACCAAGGACTGT |
| | | CTACCGCTACAAAAGACACTTACGATGCACTGCATATGCA |
| | | AGCACTCCCGCCGAGA (SEQ ID NO: 868) |
| | tEGFR Tag | ATGGCCCTGCCTGTGACAGCTCTGCTGCTTCCTCTGGCAC |
| | | TGCTGCTGCATGCTGCCAGACCAGGCAGCAGAAAAGTGTG |
| | | CAACGGCATCGGCATCGGAGAGTTCAAGGACAGCCTGAGC |
| | | ATCAACGCCACCAACATCAAGCACTTCAAGAACTGCACCA |
| | | GCATCAGCGGCGACCTGCACATTCTGCCTGTGGCCTTTAG |
| | | AGGCGACAGCTTCACCCACACACCTCCACTCGATCCCCAG |
| | | GAGCTGGACATCCTGAAAACCGTGAAAGAGATCACCGGCT |
| | | TTCTGCTGATCCAGGCTTGGCCCGAGAACCGGACAGATCT |
| | | GCACGCCTTCGAGAACCTGGAAATCATCAGAGGCCGGACC |
| | | AAGCAGCACGGCCAGTTTTCTCTGGCTGTGGTGTCCCTGA |
| | | ACATCACCAGCCTGGGCCTGAGAAGCCTGAAAGAAATCAG |
| | | CGACGGCGACGTGATCATCTCCGGCAACAAGAACCTGTGC |
| | | TACGCCAACACCATCAACTGGAAGAAGCTGTTCGGCACCA |
| | | GCGGCCAGAAAACAAAGATCATCAGCAACCGGGGCGAGAA |
| | | CAGCTGCAAGGCTACAGGCCAAGTGTGCCACGCTCTGTGT |
| | | AGCCCTGAAGGCTGTTGGGGACCCGAGCCTAGAGATTGCG |
| | | TGTCCTGCAGAAACGTGTCCCGGGGCAGAGAATGCGTGGA |
| | | CAAGTGCAATCTGCTGGAAGGCGAGCCCCGCGAGTTCGTG |
| | | GAAAACAGCGAGTGCATCCAGTGTCACCCCGAGTGTCTGC |
| | | CCCAGGCCATGAACATTACCTGTACCGGCAGAGGCCCCGA |
| | | CAACTGTATTCAGTGCGCCCACTACATCGACGGCCCTCAC |
| | | TGCGTGAAAACATGTCCTGCTGGCGTGATGGGAGAGAACA |
| | | ACACCCTCGTGTGGAAGTATGCCGACGCCGGACATGTGTG |
| | | CCACCTGTGTCACCCTAATTGCACCTACGGCTGTACAGGC |
| | | CCTGGCCTGGAAGGCTGTCCAACAAACGGACCTAAGATCC |
| | | CCTCTATCGCCACCGGCATGGTTGGAGCCTTGCTGCTTCT |
| | | GCTGGTGGTGGCCCTTGGCATCGGCCTGTTTATG (SEQ |
| | | ID NO: 869) |
| Anti-ROR1 | Signal Peptide | ATGCTGCTGCTGGTGACAAGCCTGCTGCTGTGCGAGCTGC |
| CAR | scFv | CCCACCCCGCCTTTCTGCTGATCCCC (SEQ ID NO: 870) |
| | | CAGGAACAGCTCGTCGAAAGCGGCGGCAGACTGGTGACAC |
| | | CTGGCGGCAGCCTGACCCTGAGCTGCAAGGCCAGCGGCTT |
| | | CGACTTCAGCGCCTACTACATGAGCTGGGTCCGCCAGGCC |
| | | CCTGGCAAGGGACTGGAATGGATCGCCACCATCTACCCCA |
| | | GCAGCGGCAAGACCTACTACGCCACCTGGGTGAACGGACG |
| | | GTTCACCATCTCCAGCGACAACGCCCAGAACACCGTGGAC |
| | | CTGCAGATGAACAGCCTGACAGCCGCCGACCGGGCCACCT |
| | | ACTTTTGCGCCAGAGACAGCTACGCCGACGACGGCGCCCT |
| | | GTTCAACATCTGGGGCCCTGGCACCCTGGTGACAATCTCT |
| | | AGCGGCGGAGGCGGATCTGGTGGCGGAGGAAGTGGCGGCG |
| | | GAGGATCTGAGCTGGTGCTGACCCAGAGCCCCTCTGTGTC |
| | | TGCTGCCCTGGGAAGCCCTGCCAAGATCACCTGTACCCTG |
| | | AGCAGCGCCCACAAGACCGACACCATCGACTGGTATCAGC |
| | | AGCTGCAGGGCGAGGCCCCCAGATACCTGATGCAGGTGCA |
| | | GAGCGACGGCAGCTACACCAAGAGGCCAGGCGTGCCCGAC |
| | | CGGTTCAGCGGATCTAGCTCTGGCGCCGACCGCTACCTGA |
| | | TCATCCCCAGCGTGCAGGCCGATGACGAGGCCGATTACTA |
| | | CTGTGGCGCCGACTACATCGGCGGCTACGTGTTCGGCGGA |
| | | GGCACCCAGCTGACCGTGACCGGC (SEQ ID NO: 871) |
| | CD8a | GAGTCTAAGTACGGACCGCCCTGCCCCCCTTGCCCTATGT |
| | Hinge/Transmembrane | TCTGGGTGCTGGTGGTGGTGGGCGGGGTGCTGGCCTGCTA |
| | | CAGCCTGCTGGTGACAGTGGCCTTCATCATCTTTTGGGTG |
| | | (SEQ ID NO: 872) |
| | CD28 Intracellular | CGGAGCAAGCGGAGCAGGCTGCTGCATTCGGATTACATGA |
| | | ACATGACCCCAAGGAGGCCTGGTCCGACTCGGAAGCACTA |
| | | CCAGCCCTATGCCCCGCCTCGCGATTTCGCCGCCTACCGC |
| | | TCA (SEQ ID NO: 873) |
| | CD3 zeta | CGGGTGAAGTTCAGCAGAAGCGCCGACGCCCCTGCCTACC |
| | | AGCAGGGCCAGAATCAGCTGTACAACGAGCTGAACCTGGG |
| | | CAGAAGGGAAGAGTACGACGTCCTGGATAAGCGGAGAGGC |
| | | CGGGACCCTGAGATGGGCGGCAAGCCTCGGCGGAAGAACC |
| | | CCCAGGAAGGCCTGTATAACGAACTGCAGAAAGACAAGAT |
| | | GGCCGAGGCCTACAGCGAGATCGGCATGAAGGGCGAGCGG |
| | | AGGCGGGGCAAGGGCCACGACGGCCTGTATCAGGGCCTGT |
| | | CCACCGCCACCAAGGATACCTACGACGCCCTGCACATGCA |
| | | GGCCCTGCCCCCAAGG (SEQ ID NO: 874) |
| | tEGFR Tag | ATGCTTCTCCTGGTGACAAGCCTTCTGCTCTGTGAGTTAC |
| | | CACACCCAGCATTCCTCCTGATCCCACGCAAAGTGTGTAA |
| | | CGGAATAGGTATTGGTGAATTTAAAGACTCACTCTCCATA |
| | | AATGCTACGAATATTAAACACTTCAAAAACTGCACCTCCA |
| | | TCAGTGGCGATCTCCACATCCTGCCGGTGGCATTTAGGGG |
| | | TGACTCCTTCACACATACTCCTCCTCTGGATCCACAGGAA |
| | | CTGGATATTCTGAAAACCGTAAAGGAAATCACAGGGTTTT |
| | | TGCTGATTCAGGCTTGGCCTGAAAACAGGACGGACCTCCA |
| | | TGCCTTTGAGAACCTAGAAATCATACGCGGCAGGACCAAG |
| | | CAACATGGTCAGTTTTCTCTTGCAGTCGTCAGCCTGAACA |
| | | TAACATCCTTGGGATTACGCTCCCTCAAGGAGATAAGTGA |
| | | TGGAGATGTGATAATTTCAGGAAACAAAAATTTGTGCTAT |
| | | GCAAATACAATAAACTGGAAAAAACTGTTTGGGACCTCCG |
| | | GTCAGAAAACCAAAATTATAAGCAACAGAGGTGAAAACAG |
| | | CTGCAAGGCCACAGGCCAGGTCTGCCATGCCTTGTGCTCC |
| | | CCCGAGGGCTGCTGGGGCCCGGAGCCCAGGGACTGCGTCT |
| | | CTTGCCGGAATGTCAGCCGAGGCAGGGAATGCGTGGACAA |
| | | GTGCAACCTTCTGGAGGGTGAGCCAAGGGAGTTTGTGGAG |
| | | AACTCTGAGTGCATACAGTGCCACCCAGAGTGCCTGCCTC |
| | | AGGCCATGAACATCACCTGCACAGGACGGGGACCAGACAA |
| | | CTGTATCCAGTGTGCCCACTACATTGACGGCCCCCACTGC |
| | | GTCAAGACCTGCCCGGCAGGAGTCATGGGAGAAAACAACA |
| | | CCCTGGTCTGGAAGTACGCAGACGCCGGCCATGTGTGCCA |
| | | CCTGTGCCATCCAAACTGCACCTACGGATGCACTGGGCCA |
| | | GGTCTTGAAGGCTGTCCAACGAATGGGCCTAAGATCCCGT |
| | | CCATCGCCACTGGGATGGTGGGGGCCCTCCTCTTGCTGCT |
| | | GGTGGTGGCCCTGGGGATCGGCCTCTTCATGV (SEQ ID |
| | | NO: 875) |

TABLE 14
Prime editing guide RNA (pegRNA) sequences. In some embodiments, a
pegRNA sequences further contain a 5′ G. In some cases, a pegRNA further comprises
the sequence “cacc” or “caccg” at the 5′ end.

| | SEQ ID |
|---|---|
| pegRNA Sequence | NO |
| CCUAAAGUUAAUUAUGUACCguuuuagaGCUAGAAAUAGCAAGUUAAAAUAAGGCUAGUCCGU | 882 |
| UAUCAACUUGAAAAAGUGGCACCGAGUCGgugcUGGACCAGGCACAUAAUUAA | |
| CCUAAAGUUAAUUAUGUACCguuuuagaGCUAGAAAUAGCAAGUUAAAAUAAGGCUAGUCCGU | 883 |
| UAUCAACUUGAAAAAGUGGCACCGAGUCGgugcUGGACCAGGCACAUAAUUAAC | |
| CCUAAAGUUAAUUAUGUACCguuuuagaGCUAGAAAUAGCAAGUUAAAAUAAGGCUAGUCCGU | 884 |
| UAUCAACUUGAAAAAGUGGCACCGAGUCGgugcUGGACCAGGCACAUAAUUAACU | |
| CCUAAAGUUAAUUAUGUACCguuuuagaGCUAGAAAUAGCAAGUUAAAAUAAGGCUAGUCCGU | 885 |
| UAUCAACUUGAAAAAGUGGCACCGAGUCGgugcUGGACCAGGCACAUAAUUAACUU | |
| CCUAAAGUUAAUUAUGUACCguuuuagaGCUAGAAAUAGCAAGUUAAAAUAAGGCUAGUCCGU | 886 |
| UAUCAACUUGAAAAAGUGGCACCGAGUCGgugcUGGACCAGGCACAUAAUUAACUUU | |
| CCUAAAGUUAAUUAUGUACCguuuuagaGCUAGAAAUAGCAAGUUAAAAUAAGGCUAGUCCGU | 887 |
| UAUCAACUUGAAAAAGUGGCACCGAGUCGgugcUGGACCAGGCACAUAAUUAACUUUA | |
| CCUAAAGUUAAUUAUGUACCguuuuagaGCUAGAAAUAGCAAGUUAAAAUAAGGCUAGUCCGU | 888 |
| UAUCAACUUGAAAAAGUGGCACCGAGUCGgugcUUGGACCAGGCACAUAAUUAA | |
| CCUAAAGUUAAUUAUGUACCguuuuagaGCUAGAAAUAGCAAGUUAAAAUAAGGCUAGUCCGU | 889 |
| UAUCAACUUGAAAAAGUGGCACCGAGUCGgugcUUGGACCAGGCACAUAAUUAAC | |
| CCUAAAGUUAAUUAUGUACCguuuuagaGCUAGAAAUAGCAAGUUAAAAUAAGGCUAGUCCGU | 890 |
| UAUCAACUUGAAAAAGUGGCACCGAGUCGgugcUUGGACCAGGCACAUAAUUAACU | |
| CCUAAAGUUAAUUAUGUACCguuuuagaGCUAGAAAUAGCAAGUUAAAAUAAGGCUAGUCCGU | 891 |
| UAUCAACUUGAAAAAGUGGCACCGAGUCGgugcUUGGACCAGGCACAUAAUUAACUU | |
| CCUAAAGUUAAUUAUGUACCguuuuagaGCUAGAAAUAGCAAGUUAAAAUAAGGCUAGUCCGU | 892 |
| UAUCAACUUGAAAAAGUGGCACCGAGUCGgugcUUGGACCAGGCACAUAAUUAACUUU | |
| CCUAAAGUUAAUUAUGUACCguuuuagaGCUAGAAAUAGCAAGUUAAAAUAAGGCUAGUCCGU | 893 |
| UAUCAACUUGAAAAAGUGGCACCGAGUCGgugcUUGGACCAGGCACAUAAUUAACUUUA | |
| CCUAAAGUUAAUUAUGUACCguuuuagaGCUAGAAAUAGCAAGUUAAAAUAAGGCUAGUCCGU | 894 |
| UAUCAACUUGAAAAAGUGGCACCGAGUCGgugcCUUGGACCAGGCACAUAAUUAA | |
| CCUAAAGUUAAUUAUGUACCguuuuagaGCUAGAAAUAGCAAGUUAAAAUAAGGCUAGUCCGU | 895 |
| UAUCAACUUGAAAAAGUGGCACCGAGUCGgugcCUUGGACCAGGCACAUAAUUAAC | |
| CCUAAAGUUAAUUAUGUACCguuuuagaGCUAGAAAUAGCAAGUUAAAAUAAGGCUAGUCCGU | 896 |
| UAUCAACUUGAAAAAGUGGCACCGAGUCGgugcCUUGGACCAGGCACAUAAUUAACU | |
| CCUAAAGUUAAUUAUGUACCguuuuagaGCUAGAAAUAGCAAGUUAAAAUAAGGCUAGUCCGU | 897 |
| UAUCAACUUGAAAAAGUGGCACCGAGUCGgugcCUUGGACCAGGCACAUAAUUAACUU | |
| CCUAAAGUUAAUUAUGUACCguuuuagaGCUAGAAAUAGCAAGUUAAAAUAAGGCUAGUCCGU | 898 |
| UAUCAACUUGAAAAAGUGGCACCGAGUCGgugcCUUGGACCAGGCACAUAAUUAACUUU | |
| CCUAAAGUUAAUUAUGUACCguuuuagaGCUAGAAAUAGCAAGUUAAAAUAAGGCUAGUCCGU | 899 |
| UAUCAACUUGAAAAAGUGGCACCGAGUCGgugcCUUGGACCAGGCACAUAAUUAACUUUA | |
| CCUAAAGUUAAUUAUGUACCguuuuagaGCUAGAAAUAGCAAGUUAAAAUAAGGCUAGUCCGU | 900 |
| UAUCAACUUGAAAAAGUGGCACCGAGUCGgugcCCUUGGACCAGGCACAUAAUUAA | |
| CCUAAAGUUAAUUAUGUACCguuuuagaGCUAGAAAUAGCAAGUUAAAAUAAGGCUAGUCCGU | 901 |
| UAUCAACUUGAAAAAGUGGCACCGAGUCGgugcCCUUGGACCAGGCACAUAAUUAAC | |
| CCUAAAGUUAAUUAUGUACCguuuuagaGCUAGAAAUAGCAAGUUAAAAUAAGGCUAGUCCGU | 902 |
| UAUCAACUUGAAAAAGUGGCACCGAGUCGgugcCCUUGGACCAGGCACAUAAUUAACU | |
| CCUAAAGUUAAUUAUGUACCguuuuagaGCUAGAAAUAGCAAGUUAAAAUAAGGCUAGUCCGU | 903 |
| UAUCAACUUGAAAAAGUGGCACCGAGUCGgugcCCUUGGACCAGGCACAUAAUUAACUU | |
| CCUAAAGUUAAUUAUGUACCguuuuagaGCUAGAAAUAGCAAGUUAAAAUAAGGCUAGUCCGU | 904 |
| UAUCAACUUGAAAAAGUGGCACCGAGUCGgugcCCUUGGACCAGGCACAUAAUUAACUUU | |
| CCUAAAGUUAAUUAUGUACCguuuuagaGCUAGAAAUAGCAAGUUAAAAUAAGGCUAGUCCGU | 905 |
| UAUCAACUUGAAAAAGUGGCACCGAGUCGgugcCCUUGGACCAGGCACAUAAUUAACUUUA | |
| CCUAAAGUUAAUUAUGUACCguuuuagaGCUAGAAAUAGCAAGUUAAAAUAAGGCUAGUCCGU | 906 |
| UAUCAACUUGAAAAAGUGGCACCGAGUCGgugcUCCUUGGACCAGGCACAUAAUUAA | |
| CCUAAAGUUAAUUAUGUACCguuuuagaGCUAGAAAUAGCAAGUUAAAAUAAGGCUAGUCCGU | 907 |
| UAUCAACUUGAAAAAGUGGCACCGAGUCGgugcUCCUUGGACCAGGCACAUAAUUAAC | |
| CCUAAAGUUAAUUAUGUACCguuuuagaGCUAGAAAUAGCAAGUUAAAAUAAGGCUAGUCCGU | 908 |
| UAUCAACUUGAAAAAGUGGCACCGAGUCGgugcUCCUUGGACCAGGCACAUAAUUAACU | |
| CCUAAAGUUAAUUAUGUACCguuuuagaGCUAGAAAUAGCAAGUUAAAAUAAGGCUAGUCCGU | 909 |
| UAUCAACUUGAAAAAGUGGCACCGAGUCGgugcUCCUUGGACCAGGCACAUAAUUAACUU | |
| CCUAAAGUUAAUUAUGUACCguuuuagaGCUAGAAAUAGCAAGUUAAAAUAAGGCUAGUCCGU | 910 |
| UAUCAACUUGAAAAAGUGGCACCGAGUCGgugcUCCUUGGACCAGGCACAUAAUUAACUUU | |
| CCUAAAGUUAAUUAUGUACCguuuuagaGCUAGAAAUAGCAAGUUAAAAUAAGGCUAGUCCGU | 911 |
| UAUCAACUUGAAAAAGUGGCACCGAGUCGgugcUCCUUGGACCAGGCACAUAAUUAACUUUA | |
| CCUAAAGUUAAUUAUGUACCguuuuagaGCUAGAAAUAGCAAGUUAAAAUAAGGCUAGUCCGU | 912 |
| UAUCAACUUGAAAAAGUGGCACCGAGUCGgugcUUCCUUGGACCAGGCACAUAAUUAA | |
| CCUAAAGUUAAUUAUGUACCguuuuagaGCUAGAAAUAGCAAGUUAAAAUAAGGCUAGUCCGU | 913 |
| UAUCAACUUGAAAAAGUGGCACCGAGUCGgugcUUCCUUGGACCAGGCACAUAAUUAAC | |
| CCUAAAGUUAAUUAUGUACCguuuuagaGCUAGAAAUAGCAAGUUAAAAUAAGGCUAGUCCGU | 914 |
| UAUCAACUUGAAAAAGUGGCACCGAGUCGgugcUUCCUUGGACCAGGCACAUAAUUAACU | |
| CCUAAAGUUAAUUAUGUACCguuuuagaGCUAGAAAUAGCAAGUUAAAAUAAGGCUAGUCCGU | 915 |
| UAUCAACUUGAAAAAGUGGCACCGAGUCGgugcUUCCUUGGACCAGGCACAUAAUUAACUU | |
| CCUAAAGUUAAUUAUGUACCguuuuagaGCUAGAAAUAGCAAGUUAAAAUAAGGCUAGUCCGU | 916 |
| UAUCAACUUGAAAAAGUGGCACCGAGUCGgugcUUCCUUGGACCAGGCACAUAAUUAACUUU | |
| CCUAAAGUUAAUUAUGUACCguuuuagaGCUAGAAAUAGCAAGUUAAAAUAAGGCUAGUCCGU | 917 |
| UAUCAACUUGAAAAAGUGGCACCGAGUCGgugcUUCCUUGGACCAGGCACAUAAUUAACUUUA | |
| CCUAAAGUUAAUUAUGUACCguuuuagaGCUAGAAAUAGCAAGUUAAAAUAAGGCUAGUCCGU | 918 |
| UAUCAACUUGAAAAAGUGGCACCGAGUCGgugcGUUCCUUGGACCAGGCACAUAAUUAA | |
| CCUAAAGUUAAUUAUGUACCguuuuagaGCUAGAAAUAGCAAGUUAAAAUAAGGCUAGUCCGU | 919 |
| UAUCAACUUGAAAAAGUGGCACCGAGUCGgugcGUUCCUUGGACCAGGCACAUAAUUAAC | |
| CCUAAAGUUAAUUAUGUACCguuuuagaGCUAGAAAUAGCAAGUUAAAAUAAGGCUAGUCCGU | 920 |
| UAUCAACUUGAAAAAGUGGCACCGAGUCGgugcGUUCCUUGGACCAGGCACAUAAUUAACU | |
| CCUAAAGUUAAUUAUGUACCguuuuagaGCUAGAAAUAGCAAGUUAAAAUAAGGCUAGUCCGU | 921 |
| UAUCAACUUGAAAAAGUGGCACCGAGUCGgugcGUUCCUUGGACCAGGCACAUAAUUAACUU | |
| CCUAAAGUUAAUUAUGUACCguuuuagaGCUAGAAAUAGCAAGUUAAAAUAAGGCUAGUCCGU | 922 |
| UAUCAACUUGAAAAAGUGGCACCGAGUCGgugcGUUCCUUGGACCAGGCACAUAAUUAACUUU | |
| CCUAAAGUUAAUUAUGUACCguuuuagaGCUAGAAAUAGCAAGUUAAAAUAAGGCUAGUCCGU | 923 |
| UAUCAACUUGAAAAAGUGGCACCGAGUCGgugcGUUCCUUGGACCAGGCACAUAAUUAACUUU | |
| A | |
| CCUAAAGUUAAUUAUGUACCguuuuagaGCUAGAAAUAGCAAGUUAAAAUAAGGCUAGUCCGU | 924 |
| UAUCAACUUGAAAAAGUGGCACCGAGUCGgugcAGUUCCUUGGACCAGGCACAUAAUUAA | |
| CCUAAAGUUAAUUAUGUACCguuuuagaGCUAGAAAUAGCAAGUUAAAAUAAGGCUAGUCCGU | 925 |
| UAUCAACUUGAAAAAGUGGCACCGAGUCGgugcAGUUCCUUGGACCAGGCACAUAAUUAAC | |
| CCUAAAGUUAAUUAUGUACCguuuuagaGCUAGAAAUAGCAAGUUAAAAUAAGGCUAGUCCGU | 926 |
| UAUCAACUUGAAAAAGUGGCACCGAGUCGgugcAGUUCCUUGGACCAGGCACAUAAUUAACU | |
| CCUAAAGUUAAUUAUGUACCguuuuagaGCUAGAAAUAGCAAGUUAAAAUAAGGCUAGUCCGU | 927 |
| UAUCAACUUGAAAAAGUGGCACCGAGUCGgugcAGUUCCUUGGACCAGGCACAUAAUUAACUU | |
| CCUAAAGUUAAUUAUGUACCguuuuagaGCUAGAAAUAGCAAGUUAAAAUAAGGCUAGUCCGU | 928 |
| UAUCAACUUGAAAAAGUGGCACCGAGUCGgugcAGUUCCUUGGACCAGGCACAUAAUUAACUU | |
| U | |
| CCUAAAGUUAAUUAUGUACCguuuuagaGCUAGAAAUAGCAAGUUAAAAUAAGGCUAGUCCGU | 929 |
| UAUCAACUUGAAAAAGUGGCACCGAGUCGgugcAGUUCCUUGGACCAGGCACAUAAUUAACUU | |
| UA | |
| CCUAAAGUUAAUUAUGUACCguuuuagaGCUAGAAAUAGCAAGUUAAAAUAAGGCUAGUCCGU | 930 |
| UAUCAACUUGAAAAAGUGGCACCGAGUCGgugcCAGUUCCUUGGACCAGGCACAUAAUUAA | |
| CCUAAAGUUAAUUAUGUACCguuuuagaGCUAGAAAUAGCAAGUUAAAAUAAGGCUAGUCCGU | 931 |
| UAUCAACUUGAAAAAGUGGCACCGAGUCGgugcCAGUUCCUUGGACCAGGCACAUAAUUAAC | |
| CCUAAAGUUAAUUAUGUACCguuuuagaGCUAGAAAUAGCAAGUUAAAAUAAGGCUAGUCCGU | 932 |
| UAUCAACUUGAAAAAGUGGCACCGAGUCGgugcCAGUUCCUUGGACCAGGCACAUAAUUAACU | |
| CCUAAAGUUAAUUAUGUACCguuuuagaGCUAGAAAUAGCAAGUUAAAAUAAGGCUAGUCCGU | 933 |
| UAUCAACUUGAAAAAGUGGCACCGAGUCGgugcCAGUUCCUUGGACCAGGCACAUAAUUAACU | |
| U | |
| CCUAAAGUUAAUUAUGUACCguuuuagaGCUAGAAAUAGCAAGUUAAAAUAAGGCUAGUCCGU | 934 |
| UAUCAACUUGAAAAAGUGGCACCGAGUCGgugcCAGUUCCUUGGACCAGGCACAUAAUUAACU | |
| UU | |
| CCUAAAGUUAAUUAUGUACCguuuuagaGCUAGAAAUAGCAAGUUAAAAUAAGGCUAGUCCGU | 935 |
| UAUCAACUUGAAAAAGUGGCACCGAGUCGgugcCAGUUCCUUGGACCAGGCACAUAAUUAACU | |
| UUA | |
| CCUAAAGUUAAUUAUGUACCguuuuagaGCUAGAAAUAGCAAGUUAAAAUAAGGCUAGUCCGU | 936 |
| UAUCAACUUGAAAAAGUGGCACCGAGUCGgugcCCAGUUCCUUGGACCAGGCACAUAAUUAA | |
| CCUAAAGUUAAUUAUGUACCguuuuagaGCUAGAAAUAGCAAGUUAAAAUAAGGCUAGUCCGU | 937 |
| UAUCAACUUGAAAAAGUGGCACCGAGUCGgugcCCAGUUCCUUGGACCAGGCACAUAAUUAAC | |
| CCUAAAGUUAAUUAUGUACCguuuuagaGCUAGAAAUAGCAAGUUAAAAUAAGGCUAGUCCGU | 938 |
| UAUCAACUUGAAAAAGUGGCACCGAGUCGgugcCCAGUUCCUUGGACCAGGCACAUAAUUAAC | |
| U | |
| CCUAAAGUUAAUUAUGUACCguuuuagaGCUAGAAAUAGCAAGUUAAAAUAAGGCUAGUCCGU | 939 |
| UAUCAACUUGAAAAAGUGGCACCGAGUCGgugcCCAGUUCCUUGGACCAGGCACAUAAUUAAC | |
| UU | |
| CCUAAAGUUAAUUAUGUACCguuuuagaGCUAGAAAUAGCAAGUUAAAAUAAGGCUAGUCCGU | 940 |
| UAUCAACUUGAAAAAGUGGCACCGAGUCGgugcCCAGUUCCUUGGACCAGGCACAUAAUUAAC | |
| UUU | |
| CCUAAAGUUAAUUAUGUACCguuuuagaGCUAGAAAUAGCAAGUUAAAAUAAGGCUAGUCCGU | 941 |
| UAUCAACUUGAAAAAGUGGCACCGAGUCGgugcCCAGUUCCUUGGACCAGGCACAUAAUUAAC | |
| UUUA | |
| CCUAAAGUUAAUUAUGUACCguuuuagaGCUAGAAAUAGCAAGUUAAAAUAAGGCUAGUCCGU | 942 |
| UAUCAACUUGAAAAAGUGGCACCGAGUCGgugcGCCAGUUCCUUGGACCAGGCACAUAAUUAA | |
| CCUAAAGUUAAUUAUGUACCguuuuagaGCUAGAAAUAGCAAGUUAAAAUAAGGCUAGUCCGU | 943 |
| UAUCAACUUGAAAAAGUGGCACCGAGUCGgugcGCCAGUUCCUUGGACCAGGCACAUAAUUAA | |
| C | |
| CCUAAAGUUAAUUAUGUACCguuuuagaGCUAGAAAUAGCAAGUUAAAAUAAGGCUAGUCCGU | 944 |
| UAUCAACUUGAAAAAGUGGCACCGAGUCGgugcGCCAGUUCCUUGGACCAGGCACAUAAUUAA | |
| CU | |
| CCUAAAGUUAAUUAUGUACCguuuuagaGCUAGAAAUAGCAAGUUAAAAUAAGGCUAGUCCGU | 945 |
| UAUCAACUUGAAAAAGUGGCACCGAGUCGgugcGCCAGUUCCUUGGACCAGGCACAUAAUUAA | |
| CUU | |
| CCUAAAGUUAAUUAUGUACCguuuuagaGCUAGAAAUAGCAAGUUAAAAUAAGGCUAGUCCGU | 946 |
| UAUCAACUUGAAAAAGUGGCACCGAGUCGgugcGCCAGUUCCUUGGACCAGGCACAUAAUUAA | |
| CUUU | |
| CCUAAAGUUAAUUAUGUACCguuuuagaGCUAGAAAUAGCAAGUUAAAAUAAGGCUAGUCCGU | 947 |
| UAUCAACUUGAAAAAGUGGCACCGAGUCGgugcGCCAGUUCCUUGGACCAGGCACAUAAUUAA | |
| CUUUA | |
| CCUAAAGUUAAUUAUGUACCguuuuagaGCUAGAAAUAGCAAGUUAAAAUAAGGCUAGUCCGU | 948 |
| UAUCAACUUGAAAAAGUGGCACCGAGUCGgugcUGCCAGUUCCUUGGACCAGGCACAUAAUUA | |
| A | |
| CCUAAAGUUAAUUAUGUACCguuuuagaGCUAGAAAUAGCAAGUUAAAAUAAGGCUAGUCCGU | 949 |
| UAUCAACUUGAAAAAGUGGCACCGAGUCGgugcUGCCAGUUCCUUGGACCAGGCACAUAAUUA | |
| AC | |
| CCUAAAGUUAAUUAUGUACCguuuuagaGCUAGAAAUAGCAAGUUAAAAUAAGGCUAGUCCGU | 950 |
| UAUCAACUUGAAAAAGUGGCACCGAGUCGgugcUGCCAGUUCCUUGGACCAGGCACAUAAUUA | |
| ACU | |
| CCUAAAGUUAAUUAUGUACCguuuuagaGCUAGAAAUAGCAAGUUAAAAUAAGGCUAGUCCGU | 951 |
| UAUCAACUUGAAAAAGUGGCACCGAGUCGgugcUGCCAGUUCCUUGGACCAGGCACAUAAUUA | |
| ACUU | |
| CCUAAAGUUAAUUAUGUACCguuuuagaGCUAGAAAUAGCAAGUUAAAAUAAGGCUAGUCCGU | 952 |
| UAUCAACUUGAAAAAGUGGCACCGAGUCGgugcUGCCAGUUCCUUGGACCAGGCACAUAAUUA | |
| ACUUU | |
| CCUAAAGUUAAUUAUGUACCguuuuagaGCUAGAAAUAGCAAGUUAAAAUAAGGCUAGUCCGU | 953 |
| UAUCAACUUGAAAAAGUGGCACCGAGUCGgugcUGCCAGUUCCUUGGACCAGGCACAUAAUUA | |
| ACUUUA | |
| CCUAAAGUUAAUUAUGUACCguuuuagaGCUAGAAAUAGCAAGUUAAAAUAAGGCUAGUCCGU | 954 |
| UAUCAACUUGAAAAAGUGGCACCGAGUCGgugcAUGCCAGUUCCUUGGACCAGGCACAUAAUU | |
| AA | |
| CCUAAAGUUAAUUAUGUACCguuuuagaGCUAGAAAUAGCAAGUUAAAAUAAGGCUAGUCCGU | 955 |
| UAUCAACUUGAAAAAGUGGCACCGAGUCGgugcAUGCCAGUUCCUUGGACCAGGCACAUAAUU | |
| AAC | |
| CCUAAAGUUAAUUAUGUACCguuuuagaGCUAGAAAUAGCAAGUUAAAAUAAGGCUAGUCCGU | 956 |
| UAUCAACUUGAAAAAGUGGCACCGAGUCGgugcAUGCCAGUUCCUUGGACCAGGCACAUAAUU | |
| AACU | |
| CCUAAAGUUAAUUAUGUACCguuuuagaGCUAGAAAUAGCAAGUUAAAAUAAGGCUAGUCCGU | 957 |
| UAUCAACUUGAAAAAGUGGCACCGAGUCGgugcAUGCCAGUUCCUUGGACCAGGCACAUAAUU | |
| AACUU | |
| CCUAAAGUUAAUUAUGUACCguuuuagaGCUAGAAAUAGCAAGUUAAAAUAAGGCUAGUCCGU | 958 |
| UAUCAACUUGAAAAAGUGGCACCGAGUCGgugcAUGCCAGUUCCUUGGACCAGGCACAUAAUU | |
| AACUUU | |
| CCUAAAGUUAAUUAUGUACCguuuuagaGCUAGAAAUAGCAAGUUAAAAUAAGGCUAGUCCGU | 959 |
| UAUCAACUUGAAAAAGUGGCACCGAGUCGgugcAUGCCAGUUCCUUGGACCAGGCACAUAAUU | |
| AACUUUA | |
| CCUAAAGUUAAUUAUGUACCguuuuagaGCUAGAAAUAGCAAGUUAAAAUAAGGCUAGUCCGU | 960 |
| UAUCAACUUGAAAAAGUGGCACCGAGUCGgugcGAUGCCAGUUCCUUGGACCAGGCACAUAAU | |
| UAA | |
| CCUAAAGUUAAUUAUGUACCguuuuagaGCUAGAAAUAGCAAGUUAAAAUAAGGCUAGUCCGU | 961 |
| UAUCAACUUGAAAAAGUGGCACCGAGUCGgugcGAUGCCAGUUCCUUGGACCAGGCACAUAAU | |
| UAAC | |
| CCUAAAGUUAAUUAUGUACCguuuuagaGCUAGAAAUAGCAAGUUAAAAUAAGGCUAGUCCGU | 962 |
| UAUCAACUUGAAAAAGUGGCACCGAGUCGgugcGAUGCCAGUUCCUUGGACCAGGCACAUAAU | |
| UAACU | |
| CCUAAAGUUAAUUAUGUACCguuuuagaGCUAGAAAUAGCAAGUUAAAAUAAGGCUAGUCCGU | 963 |
| UAUCAACUUGAAAAAGUGGCACCGAGUCGgugcGAUGCCAGUUCCUUGGACCAGGCACAUAAU | |
| UAACUU | |
| CCUAAAGUUAAUUAUGUACCguuuuagaGCUAGAAAUAGCAAGUUAAAAUAAGGCUAGUCCGU | 964 |
| UAUCAACUUGAAAAAGUGGCACCGAGUCGgugcGAUGCCAGUUCCUUGGACCAGGCACAUAAU | |
| UAACUUU | |
| CCUAAAGUUAAUUAUGUACCguuuuagaGCUAGAAAUAGCAAGUUAAAAUAAGGCUAGUCCGU | 965 |
| UAUCAACUUGAAAAAGUGGCACCGAGUCGgugcGAUGCCAGUUCCUUGGACCAGGCACAUAAU | |
| UAACUUUA | |
| CCUAAAGUUAAUUAUGUACCguuuuagaGCUAGAAAUAGCAAGUUAAAAUAAGGCUAGUCCGU | 966 |
| UAUCAACUUGAAAAAGUGGCACCGAGUCGgugcGGAUGCCAGUUCCUUGGACCAGGCACAUAA | |
| UUAA | |
| CCUAAAGUUAAUUAUGUACCguuuuagaGCUAGAAAUAGCAAGUUAAAAUAAGGCUAGUCCGU | 967 |
| UAUCAACUUGAAAAAGUGGCACCGAGUCGgugcGGAUGCCAGUUCCUUGGACCAGGCACAUAA | |
| UUAAC | |
| CCUAAAGUUAAUUAUGUACCguuuuagaGCUAGAAAUAGCAAGUUAAAAUAAGGCUAGUCCGU | 968 |
| UAUCAACUUGAAAAAGUGGCACCGAGUCGgugcGGAUGCCAGUUCCUUGGACCAGGCACAUAA | |
| UUAACU | |
| CCUAAAGUUAAUUAUGUACCguuuuagaGCUAGAAAUAGCAAGUUAAAAUAAGGCUAGUCCGU | 969 |
| UAUCAACUUGAAAAAGUGGCACCGAGUCGgugcGGAUGCCAGUUCCUUGGACCAGGCACAUAA | |
| UUAACUU | |
| CCUAAAGUUAAUUAUGUACCguuuuagaGCUAGAAAUAGCAAGUUAAAAUAAGGCUAGUCCGU | 970 |
| UAUCAACUUGAAAAAGUGGCACCGAGUCGgugcGGAUGCCAGUUCCUUGGACCAGGCACAUAA | |
| UUAACUUU | |
| CCUAAAGUUAAUUAUGUACCguuuuagaGCUAGAAAUAGCAAGUUAAAAUAAGGCUAGUCCGU | 971 |
| UAUCAACUUGAAAAAGUGGCACCGAGUCGgugcGGAUGCCAGUUCCUUGGACCAGGCACAUAA | |
| UUAACUUUA | |
| CCUAAAGUUAAUUAUGUACCguuuuagaGCUAGAAAUAGCAAGUUAAAAUAAGGCUAGUCCGU | 972 |
| UAUCAACUUGAAAAAGUGGCACCGAGUCGgugcGGGAUGCCAGUUCCUUGGACCAGGCACAUA | |
| AUUAA | |
| CCUAAAGUUAAUUAUGUACCguuuuagaGCUAGAAAUAGCAAGUUAAAAUAAGGCUAGUCCGU | 973 |
| UAUCAACUUGAAAAAGUGGCACCGAGUCGgugcGGGAUGCCAGUUCCUUGGACCAGGCACAUA | |
| AUUAAC | |
| CCUAAAGUUAAUUAUGUACCguuuuagaGCUAGAAAUAGCAAGUUAAAAUAAGGCUAGUCCGU | 974 |
| UAUCAACUUGAAAAAGUGGCACCGAGUCGgugcGGGAUGCCAGUUCCUUGGACCAGGCACAUA | |
| AUUAACU | |
| CCUAAAGUUAAUUAUGUACCguuuuagaGCUAGAAAUAGCAAGUUAAAAUAAGGCUAGUCCGU | 975 |
| UAUCAACUUGAAAAAGUGGCACCGAGUCGgugcGGGAUGCCAGUUCCUUGGACCAGGCACAUA | |
| AUUAACUU | |
| CCUAAAGUUAAUUAUGUACCguuuuagaGCUAGAAAUAGCAAGUUAAAAUAAGGCUAGUCCGU | 976 |
| UAUCAACUUGAAAAAGUGGCACCGAGUCGgugcGGGAUGCCAGUUCCUUGGACCAGGCACAUA | |
| AUUAACUUU | |
| CCUAAAGUUAAUUAUGUACCguuuuagaGCUAGAAAUAGCAAGUUAAAAUAAGGCUAGUCCGU | 977 |
| UAUCAACUUGAAAAAGUGGCACCGAGUCGgugcGGGAUGCCAGUUCCUUGGACCAGGCACAUA | |
| AUUAACUUUA | |
| CCUAAAGUUAAUUAUGUACCguuuuagaGCUAGAAAUAGCAAGUUAAAAUAAGGCUAGUCCGU | 978 |
| UAUCAACUUGAAAAAGUGGCACCGAGUCGgugcGGGGAUGCCAGUUCCUUGGACCAGGCACAU | |
| AAUUAA | |
| CCUAAAGUUAAUUAUGUACCguuuuagaGCUAGAAAUAGCAAGUUAAAAUAAGGCUAGUCCGU | 979 |
| UAUCAACUUGAAAAAGUGGCACCGAGUCGgugcGGGGAUGCCAGUUCCUUGGACCAGGCACAU | |
| AAUUAAC | |
| CCUAAAGUUAAUUAUGUACCguuuuagaGCUAGAAAUAGCAAGUUAAAAUAAGGCUAGUCCGU | 980 |
| UAUCAACUUGAAAAAGUGGCACCGAGUCGgugcGGGGAUGCCAGUUCCUUGGACCAGGCACAU | |
| AAUUAACU | |
| CCUAAAGUUAAUUAUGUACCguuuuagaGCUAGAAAUAGCAAGUUAAAAUAAGGCUAGUCCGU | 981 |
| UAUCAACUUGAAAAAGUGGCACCGAGUCGgugcGGGGAUGCCAGUUCCUUGGACCAGGCACAU | |
| AAUUAACUU | |
| CCUAAAGUUAAUUAUGUACCguuuuagaGCUAGAAAUAGCAAGUUAAAAUAAGGCUAGUCCGU | 982 |
| UAUCAACUUGAAAAAGUGGCACCGAGUCGgugcGGGGAUGCCAGUUCCUUGGACCAGGCACAU | |
| AAUUAACUUU | |
| CCUAAAGUUAAUUAUGUACCguuuuagaGCUAGAAAUAGCAAGUUAAAAUAAGGCUAGUCCGU | 983 |
| UAUCAACUUGAAAAAGUGGCACCGAGUCGgugcGGGGAUGCCAGUUCCUUGGACCAGGCACAU | |
| AAUUAACUUUA | |
| CCUAAAGUUAAUUAUGUACCguuuuagaGCUAGAAAUAGCAAGUUAAAAUAAGGCUAGUCCGU | 984 |
| UAUCAACUUGAAAAAGUGGCACCGAGUCGgugcAGGGGAUGCCAGUUCCUUGGACCAGGCACA | |
| UAAUUAA | |
| CCUAAAGUUAAUUAUGUACCguuuuagaGCUAGAAAUAGCAAGUUAAAAUAAGGCUAGUCCGU | 985 |
| UAUCAACUUGAAAAAGUGGCACCGAGUCGgugcAGGGGAUGCCAGUUCCUUGGACCAGGCACA | |
| UAAUUAAC | |
| CCUAAAGUUAAUUAUGUACCguuuuagaGCUAGAAAUAGCAAGUUAAAAUAAGGCUAGUCCGU | 986 |
| UAUCAACUUGAAAAAGUGGCACCGAGUCGgugcAGGGGAUGCCAGUUCCUUGGACCAGGCACA | |
| UAAUUAACU | |
| CCUAAAGUUAAUUAUGUACCguuuuagaGCUAGAAAUAGCAAGUUAAAAUAAGGCUAGUCCGU | 987 |
| UAUCAACUUGAAAAAGUGGCACCGAGUCGgugcAGGGGAUGCCAGUUCCUUGGACCAGGCACA | |
| UAAUUAACUU | |
| CCUAAAGUUAAUUAUGUACCguuuuagaGCUAGAAAUAGCAAGUUAAAAUAAGGCUAGUCCGU | 988 |
| UAUCAACUUGAAAAAGUGGCACCGAGUCGgugcAGGGGAUGCCAGUUCCUUGGACCAGGCACA | |
| UAAUUAACUUU | |
| CCUAAAGUUAAUUAUGUACCguuuuagaGCUAGAAAUAGCAAGUUAAAAUAAGGCUAGUCCGU | 989 |
| UAUCAACUUGAAAAAGUGGCACCGAGUCGgugcAGGGGAUGCCAGUUCCUUGGACCAGGCACA | |
| UAAUUAACUUUA | |
| CCUAAAGUUAAUUAUGUACCguuuuagaGCUAGAAAUAGCAAGUUAAAAUAAGGCUAGUCCGU | 990 |
| UAUCAACUUGAAAAAGUGGCACCGAGUCGgugcUAGGGGAUGCCAGUUCCUUGGACCAGGCAC | |
| AUAAUUAA | |
| CCUAAAGUUAAUUAUGUACCguuuuagaGCUAGAAAUAGCAAGUUAAAAUAAGGCUAGUCCGU | 991 |
| UAUCAACUUGAAAAAGUGGCACCGAGUCGgugcUAGGGGAUGCCAGUUCCUUGGACCAGGCAC | |
| AUAAUUAAC | |
| CCUAAAGUUAAUUAUGUACCguuuuagaGCUAGAAAUAGCAAGUUAAAAUAAGGCUAGUCCGU | 992 |
| UAUCAACUUGAAAAAGUGGCACCGAGUCGgugcUAGGGGAUGCCAGUUCCUUGGACCAGGCAC | |
| AUAAUUAACU | |
| CCUAAAGUUAAUUAUGUACCguuuuagaGCUAGAAAUAGCAAGUUAAAAUAAGGCUAGUCCGU | 993 |
| UAUCAACUUGAAAAAGUGGCACCGAGUCGgugcUAGGGGAUGCCAGUUCCUUGGACCAGGCAC | |
| AUAAUUAACUU | |
| CCUAAAGUUAAUUAUGUACCguuuuagaGCUAGAAAUAGCAAGUUAAAAUAAGGCUAGUCCGU | 994 |
| UAUCAACUUGAAAAAGUGGCACCGAGUCGgugcUAGGGGAUGCCAGUUCCUUGGACCAGGCAC | |
| AUAAUUAACUUU | |
| CCUAAAGUUAAUUAUGUACCguuuuagaGCUAGAAAUAGCAAGUUAAAAUAAGGCUAGUCCGU | 995 |
| UAUCAACUUGAAAAAGUGGCACCGAGUCGgugcUAGGGGAUGCCAGUUCCUUGGACCAGGCAC | |
| AUAAUUAACUUUA | |
| CCUAAAGUUAAUUAUGUACCguuuuagaGCUAGAAAUAGCAAGUUAAAAUAAGGCUAGUCCGU | 996 |
| UAUCAACUUGAAAAAGUGGCACCGAGUCGgugcCUAGGGGAUGCCAGUUCCUUGGACCAGGCA | |
| CAUAAUUAA | |
| CCUAAAGUUAAUUAUGUACCguuuuagaGCUAGAAAUAGCAAGUUAAAAUAAGGCUAGUCCGU | 997 |
| UAUCAACUUGAAAAAGUGGCACCGAGUCGgugcCUAGGGGAUGCCAGUUCCUUGGACCAGGCA | |
| CAUAAUUAAC | |
| CCUAAAGUUAAUUAUGUACCguuuuagaGCUAGAAAUAGCAAGUUAAAAUAAGGCUAGUCCGU | 998 |
| UAUCAACUUGAAAAAGUGGCACCGAGUCGgugcCUAGGGGAUGCCAGUUCCUUGGACCAGGCA | |
| CAUAAUUAACU | |
| CCUAAAGUUAAUUAUGUACCguuuuagaGCUAGAAAUAGCAAGUUAAAAUAAGGCUAGUCCGU | 999 |
| UAUCAACUUGAAAAAGUGGCACCGAGUCGgugcCUAGGGGAUGCCAGUUCCUUGGACCAGGCA | |
| CAUAAUUAACUU | |
| CCUAAAGUUAAUUAUGUACCguuuuagaGCUAGAAAUAGCAAGUUAAAAUAAGGCUAGUCCGU | 1000 |
| UAUCAACUUGAAAAAGUGGCACCGAGUCGgugcCUAGGGGAUGCCAGUUCCUUGGACCAGGcA | |
| CAUAAUUAACUUU | |
| CCUAAAGUUAAUUAUGUACCguuuuagaGCUAGAAAUAGCAAGUUAAAAUAAGGCUAGUCCGU | 1001 |
| UAUCAACUUGAAAAAGUGGCACCGAGUCGgugcCUAGGGGAUGCCAGUUCCUUGGACCAGGCA | |
| CAUAAUUAACUUUA | |
| CCUAAAGUUAAUUAUGUACCguuuuagaGCUAGAAAUAGCAAGUUAAAAUAAGGCUAGUCCGU | 1002 |
| UAUCAACUUGAAAAAGUGGCACCGAGUCGgugcGCUAGGGGAUGCCAGUUCCUUGGACCAGGC | |
| ACAUAAUUAA | |
| CCUAAAGUUAAUUAUGUACCguuuuagaGCUAGAAAUAGCAAGUUAAAAUAAGGCUAGUCCGU | 1003 |
| UAUCAACUUGAAAAAGUGGCACCGAGUCGgugcGCUAGGGGAUGCCAGUUCCUUGGACCAGGc | |
| ACAUAAUUAAC | |
| CCUAAAGUUAAUUAUGUACCguuuuagaGCUAGAAAUAGCAAGUUAAAAUAAGGCUAGUCCGU | 1004 |
| UAUCAACUUGAAAAAGUGGCACCGAGUCGgugcGCUAGGGGAUGCCAGUUCCUUGGACCAGG | |
| ACAUAAUUAACU | |
| CCUAAAGUUAAUUAUGUACCguuuuagaGCUAGAAAUAGCAAGUUAAAAUAAGGCUAGUCCGU | 1005 |
| UAUCAACUUGAAAAAGUGGCACCGAGUCGgugcGCUAGGGGAUGCCAGUUCCUUGGACCAGGc | |
| ACAUAAUUAACUU | |
| CCUAAAGUUAAUUAUGUACCguuuuagaGCUAGAAAUAGCAAGUUAAAAUAAGGCUAGUCCGU | 1006 |
| UAUCAACUUGAAAAAGUGGCACCGAGUCGgugcGCUAGGGGAUGCCAGUUCCUUGGACCAGGC | |
| ACAUAAUUAACUUU | |
| CCUAAAGUUAAUUAUGUACCguuuuagaGCUAGAAAUAGCAAGUUAAAAUAAGGCUAGUCCGU | 1007 |
| UAUCAACUUGAAAAAGUGGCACCGAGUCGgugcGCUAGGGGAUGCCAGUUCCUUGGACCAGGC | |
| ACAUAAUUAACUUUA | |
| GGAUGCCAGUUCCUUGGACCguuuuagaGCUAGAAAUAGCAAGUUAAAAUAAGGCUAGUCCGU | 1008 |
| UAUCAACUUGAAAAAGUGGCACCGAGUCGgugcUGUgCCUGGUCCAAGGAACU | |
| GGAUGCCAGUUCCUUGGACCguuuuagaGCUAGAAAUAGCAAGUUAAAAUAAGGCUAGUCCGU | 1009 |
| UAUCAACUUGAAAAAGUGGCACCGAGUCGgugcUGUgCCUGGUCCAAGGAACUG | |
| GGAUGCCAGUUCCUUGGACCguuuuagaGCUAGAAAUAGCAAGUUAAAAUAAGGCUAGUCCGU | 1010 |
| UAUCAACUUGAAAAAGUGGCACCGAGUCGgugcUGUgCCUGGUCCAAGGAACUGG | |
| GGAUGCCAGUUCCUUGGACCguuuuagaGCUAGAAAUAGCAAGUUAAAAUAAGGCUAGUCCGU | 1011 |
| UAUCAACUUGAAAAAGUGGCACCGAGUCGgugcUGUgCCUGGUCCAAGGAACUGGC | |
| GGAUGCCAGUUCCUUGGACCguuuuagaGCUAGAAAUAGCAAGUUAAAAUAAGGCUAGUCCGU | 1012 |
| UAUCAACUUGAAAAAGUGGCACCGAGUCGgugcUGUgCCUGGUCCAAGGAACUGGCA | |
| GGAUGCCAGUUCCUUGGACCguuuuagaGCUAGAAAUAGCAAGUUAAAAUAAGGCUAGUCCGU | 1013 |
| UAUCAACUUGAAAAAGUGGCACCGAGUCGgugcUGUgCCUGGUCCAAGGAACUGGCAU | |
| GGAUGCCAGUUCCUUGGACCguuuuagaGCUAGAAAUAGCAAGUUAAAAUAAGGCUAGUCCGU | 1014 |
| UAUCAACUUGAAAAAGUGGCACCGAGUCGgugcAUGUgCCUGGUCCAAGGAACU | |
| GGAUGCCAGUUCCUUGGACCguuuuagaGCUAGAAAUAGCAAGUUAAAAUAAGGCUAGUCCGU | 1015 |
| UAUCAACUUGAAAAAGUGGCACCGAGUCGgugcAUGUgCCUGGUCCAAGGAACUG | |
| GGAUGCCAGUUCCUUGGACCguuuuagaGCUAGAAAUAGCAAGUUAAAAUAAGGCUAGUCCGU | 1016 |
| UAUCAACUUGAAAAAGUGGCACCGAGUCGgugcAUGUgCCUGGUCCAAGGAACUGG | |
| GGAUGCCAGUUCCUUGGACCguuuuagaGCUAGAAAUAGCAAGUUAAAAUAAGGCUAGUCCGU | 1017 |
| UAUCAACUUGAAAAAGUGGCACCGAGUCGgugcAUGUgCCUGGUCCAAGGAACUGGC | |
| GGAUGCCAGUUCCUUGGACCguuuuagaGCUAGAAAUAGCAAGUUAAAAUAAGGCUAGUCCGU | 1018 |
| UAUCAACUUGAAAAAGUGGCACCGAGUCGgugcAUGUgCCUGGUCCAAGGAACUGGCA | |
| GGAUGCCAGUUCCUUGGACCguuuuagaGCUAGAAAUAGCAAGUUAAAAUAAGGCUAGUCCGU | 1019 |
| UAUCAACUUGAAAAAGUGGCACCGAGUCGgugcAUGUgCCUGGUCCAAGGAACUGGCAU | |
| GGAUGCCAGUUCCUUGGACCguuuuagaGCUAGAAAUAGCAAGUUAAAAUAAGGCUAGUCCGU | 1020 |
| UAUCAACUUGAAAAAGUGGCACCGAGUCGgugcUAUGUgCCUGGUCCAAGGAACU | |
| GGAUGCCAGUUCCUUGGACCguuuuagaGCUAGAAAUAGCAAGUUAAAAUAAGGCUAGUCCGU | 1021 |
| UAUCAACUUGAAAAAGUGGCACCGAGUCGgugcUAUGUgCCUGGUCCAAGGAACUG | |
| GGAUGCCAGUUCCUUGGACCguuuuagaGCUAGAAAUAGCAAGUUAAAAUAAGGCUAGUCCGU | 1022 |
| UAUCAACUUGAAAAAGUGGCACCGAGUCGgugcUAUGUgCCUGGUCCAAGGAACUGG | |
| GGAUGCCAGUUCCUUGGACCguuuuagaGCUAGAAAUAGCAAGUUAAAAUAAGGCUAGUCCGU | 1023 |
| UAUCAACUUGAAAAAGUGGCACCGAGUCGgugcUAUGUgCCUGGUCCAAGGAACUGGC | |
| GGAUGCCAGUUCCUUGGACCguuuuagaGCUAGAAAUAGCAAGUUAAAAUAAGGCUAGUCCGU | 1024 |
| UAUCAACUUGAAAAAGUGGCACCGAGUCGgugcUAUGUgCCUGGUCCAAGGAACUGGCA | |
| GGAUGCCAGUUCCUUGGACCguuuuagaGCUAGAAAUAGCAAGUUAAAAUAAGGCUAGUCCGU | 1025 |
| UAUCAACUUGAAAAAGUGGCACCGAGUCGgugcUAUGUgCCUGGUCCAAGGAACUGGCAU | |
| GGAUGCCAGUUCCUUGGACCguuuuagaGCUAGAAAUAGCAAGUUAAAAUAAGGCUAGUCCGU | 1026 |
| UAUCAACUUGAAAAAGUGGCACCGAGUCGgugcUUAUGUgCCUGGUCCAAGGAACU | |
| GGAUGCCAGUUCCUUGGACCguuuuagaGCUAGAAAUAGCAAGUUAAAAUAAGGCUAGUCCGU | 1027 |
| UAUCAACUUGAAAAAGUGGCACCGAGUCGgugcUUAUGUgCCUGGUCCAAGGAACUG | |
| GGAUGCCAGUUCCUUGGACCguuuuagaGCUAGAAAUAGCAAGUUAAAAUAAGGCUAGUCCGU | 1028 |
| UAUCAACUUGAAAAAGUGGCACCGAGUCGgugcUUAUGUgCCUGGUCCAAGGAACUGG | |
| GGAUGCCAGUUCCUUGGACCguuuuagaGCUAGAAAUAGCAAGUUAAAAUAAGGCUAGUCCGU | 1029 |
| UAUCAACUUGAAAAAGUGGCACCGAGUCGgugcUUAUGUgCCUGGUCCAAGGAACUGGC | |
| GGAUGCCAGUUCCUUGGACCguuuuagaGCUAGAAAUAGCAAGUUAAAAUAAGGCUAGUCCGU | 1030 |
| UAUCAACUUGAAAAAGUGGCACCGAGUCGgugcUUAUGUgCCUGGUCCAAGGAACUGGCA | |
| GGAUGCCAGUUCCUUGGACCguuuuagaGCUAGAAAUAGCAAGUUAAAAUAAGGCUAGUCCGU | 1031 |
| UAUCAACUUGAAAAAGUGGCACCGAGUCGgugcUUAUGUgCCUGGUCCAAGGAACUGGCAU | |
| GGAUGCCAGUUCCUUGGACCguuuuagaGCUAGAAAUAGCAAGUUAAAAUAAGGCUAGUCCGU | 1032 |
| UAUCAACUUGAAAAAGUGGCACCGAGUCGgugcAUUAUGUgCCUGGUCCAAGGAACU | |
| GGAUGCCAGUUCCUUGGACCguuuuagaGCUAGAAAUAGCAAGUUAAAAUAAGGCUAGUCCGU | 1033 |
| UAUCAACUUGAAAAAGUGGCACCGAGUCGgugcAUUAUGUgCCUGGUCCAAGGAACUG | |
| GGAUGCCAGUUCCUUGGACCguuuuagaGCUAGAAAUAGCAAGUUAAAAUAAGGCUAGUCCGU | 1034 |
| UAUCAACUUGAAAAAGUGGCACCGAGUCGgugcAUUAUGUgCCUGGUCCAAGGAACUGG | |
| GGAUGCCAGUUCCUUGGACCguuuuagaGCUAGAAAUAGCAAGUUAAAAUAAGGCUAGUCCGU | 1035 |
| UAUCAACUUGAAAAAGUGGCACCGAGUCGgugcAUUAUGUgCCUGGUCCAAGGAACUGGC | |
| GGAUGCCAGUUCCUUGGACCguuuuagaGCUAGAAAUAGCAAGUUAAAAUAAGGCUAGUCCGU | 1036 |
| UAUCAACUUGAAAAAGUGGCACCGAGUCGgugcAUUAUGUgCCUGGUCCAAGGAACUGGCA | |
| GGAUGCCAGUUCCUUGGACCguuuuagaGCUAGAAAUAGCAAGUUAAAAUAAGGCUAGUCCGU | 1037 |
| UAUCAACUUGAAAAAGUGGCACCGAGUCGgugcAUUAUGUgCCUGGUCCAAGGAACUGGCAU | |
| GGAUGCCAGUUCCUUGGACCguuuuagaGCUAGAAAUAGCAAGUUAAAAUAAGGCUAGUCCGU | 1038 |
| UAUCAACUUGAAAAAGUGGCACCGAGUCGgugcAAUUAUGUgCCUGGUCCAAGGAACU | |
| GGAUGCCAGUUCCUUGGACCguuuuagaGCUAGAAAUAGCAAGUUAAAAUAAGGCUAGUCCGU | 1039 |
| UAUCAACUUGAAAAAGUGGCACCGAGUCGgugcAAUUAUGUgCCUGGUCCAAGGAACUG | |
| GGAUGCCAGUUCCUUGGACCguuuuagaGCUAGAAAUAGCAAGUUAAAAUAAGGCUAGUCCGU | 1040 |
| UAUCAACUUGAAAAAGUGGCACCGAGUCGgugcAAUUAUGUgCCUGGUCCAAGGAACUGG | |
| GGAUGCCAGUUCCUUGGACCguuuuagaGCUAGAAAUAGCAAGUUAAAAUAAGGCUAGUCCGU | 1041 |
| UAUCAACUUGAAAAAGUGGCACCGAGUCGgugcAAUUAUGUgCCUGGUCCAAGGAACUGGC | |
| GGAUGCCAGUUCCUUGGACCguuuuagaGCUAGAAAUAGCAAGUUAAAAUAAGGCUAGUCCGU | 1042 |
| UAUCAACUUGAAAAAGUGGCACCGAGUCGgugcAAUUAUGUgCCUGGUCCAAGGAACUGGCA | |
| GGAUGCCAGUUCCUUGGACCguuuuagaGCUAGAAAUAGCAAGUUAAAAUAAGGCUAGUCCGU | 1043 |
| UAUCAACUUGAAAAAGUGGCACCGAGUCGgugcAAUUAUGUgCCUGGUCCAAGGAACUGGCAU | |
| GGAUGCCAGUUCCUUGGACCguuuuagaGCUAGAAAUAGCAAGUUAAAAUAAGGCUAGUCCGU | 1044 |
| UAUCAACUUGAAAAAGUGGCACCGAGUCGgugcUAAUUAUGUgCCUGGUCCAAGGAACU | |
| GGAUGCCAGUUCCUUGGACCguuuuagaGCUAGAAAUAGCAAGUUAAAAUAAGGCUAGUCCGU | 1045 |
| UAUCAACUUGAAAAAGUGGCACCGAGUCGgugcUAAUUAUGUgCCUGGUCCAAGGAACUG | |
| GGAUGCCAGUUCCUUGGACCguuuuagaGCUAGAAAUAGCAAGUUAAAAUAAGGCUAGUCCGU | 1046 |
| UAUCAACUUGAAAAAGUGGCACCGAGUCGgugcUAAUUAUGUgCCUGGUCCAAGGAACUGG | |
| GGAUGCCAGUUCCUUGGACCguuuuagaGCUAGAAAUAGCAAGUUAAAAUAAGGCUAGUCCGU | 1047 |
| UAUCAACUUGAAAAAGUGGCACCGAGUCGgugcUAAUUAUGUgCCUGGUCCAAGGAACUGGC | |
| GGAUGCCAGUUCCUUGGACCguuuuagaGCUAGAAAUAGCAAGUUAAAAUAAGGCUAGUCCGU | 1048 |
| UAUCAACUUGAAAAAGUGGCACCGAGUCGgugcUAAUUAUGUgCCUGGUCCAAGGAACUGGCA | |
| GGAUGCCAGUUCCUUGGACCguuuuagaGCUAGAAAUAGCAAGUUAAAAUAAGGCUAGUCCGU | 1049 |
| UAUCAACUUGAAAAAGUGGCACCGAGUCGgugcUAAUUAUGUgCCUGGUCCAAGGAACUGGCA | |
| U | |
| GGAUGCCAGUUCCUUGGACCguuuuagaGCUAGAAAUAGCAAGUUAAAAUAAGGCUAGUCCGU | 1050 |
| UAUCAACUUGAAAAAGUGGCACCGAGUCGgugcUUAAUUAUGUgCCUGGUCCAAGGAACU | |
| GGAUGCCAGUUCCUUGGACCguuuuagaGCUAGAAAUAGCAAGUUAAAAUAAGGCUAGUCCGU | 1051 |
| UAUCAACUUGAAAAAGUGGCACCGAGUCGgugcUUAAUUAUGUgCCUGGUCCAAGGAACUG | |
| GGAUGCCAGUUCCUUGGACCguuuuagaGCUAGAAAUAGCAAGUUAAAAUAAGGCUAGUCCGU | 1052 |
| UAUCAACUUGAAAAAGUGGCACCGAGUCGgugcUUAAUUAUGUgCCUGGUCCAAGGAACUGG | |
| GGAUGCCAGUUCCUUGGACCguuuuagaGCUAGAAAUAGCAAGUUAAAAUAAGGCUAGUCCGU | 1053 |
| UAUCAACUUGAAAAAGUGGCACCGAGUCGgugcUUAAUUAUGUgCCUGGUCCAAGGAACUGGC | |
| GGAUGCCAGUUCCUUGGACCguuuuagaGCUAGAAAUAGCAAGUUAAAAUAAGGCUAGUCCGU | 1054 |
| UAUCAACUUGAAAAAGUGGCACCGAGUCGgugcUUAAUUAUGUgCCUGGUCCAAGGAACUGGC | |
| A | |
| GGAUGCCAGUUCCUUGGACCguuuuagaGCUAGAAAUAGCAAGUUAAAAUAAGGCUAGUCCGU | 1055 |
| UAUCAACUUGAAAAAGUGGCACCGAGUCGgugcUUAAUUAUGUgCCUGGUCCAAGGAACUGGC | |
| AU | |
| GGAUGCCAGUUCCUUGGACCguuuuagaGCUAGAAAUAGCAAGUUAAAAUAAGGCUAGUCCGU | 1056 |
| UAUCAACUUGAAAAAGUGGCACCGAGUCGgugcGUUAAUUAUGUgCCUGGUCCAAGGAACU | |
| GGAUGCCAGUUCCUUGGACCguuuuagaGCUAGAAAUAGCAAGUUAAAAUAAGGCUAGUCCGU | 1057 |
| UAUCAACUUGAAAAAGUGGCACCGAGUCGgugcGUUAAUUAUGUgCCUGGUCCAAGGAACUG | |
| GGAUGCCAGUUCCUUGGACCguuuuagaGCUAGAAAUAGCAAGUUAAAAUAAGGCUAGUCCGU | 1058 |
| UAUCAACUUGAAAAAGUGGCACCGAGUCGgugcGUUAAUUAUGUgCCUGGUCCAAGGAACUGG | |
| GGAUGCCAGUUCCUUGGACCguuuuagaGCUAGAAAUAGCAAGUUAAAAUAAGGCUAGUCCGU | 1059 |
| UAUCAACUUGAAAAAGUGGCACCGAGUCGgugcGUUAAUUAUGUgCCUGGUCCAAGGAACUGG | |
| C | |
| GGAUGCCAGUUCCUUGGACCguuuuagaGCUAGAAAUAGCAAGUUAAAAUAAGGCUAGUCCGU | 1060 |
| UAUCAACUUGAAAAAGUGGCACCGAGUCGgugcGUUAAUUAUGUgCCUGGUCCAAGGAACUGG | |
| CA | |
| GGAUGCCAGUUCCUUGGACCguuuuagaGCUAGAAAUAGCAAGUUAAAAUAAGGCUAGUCCGU | 1061 |
| UAUCAACUUGAAAAAGUGGCACCGAGUCGgugcGUUAAUUAUGUgCCUGGUCCAAGGAACUGG | |
| CAU | |
| GGAUGCCAGUUCCUUGGACCguuuuagaGCUAGAAAUAGCAAGUUAAAAUAAGGCUAGUCCGU | 1062 |
| UAUCAACUUGAAAAAGUGGCACCGAGUCGgugcAGUUAAUUAUGUgCCUGGUCCAAGGAACU | |
| GGAUGCCAGUUCCUUGGACCguuuuagaGCUAGAAAUAGCAAGUUAAAAUAAGGCUAGUCCGU | 1063 |
| UAUCAACUUGAAAAAGUGGCACCGAGUCGgugcAGUUAAUUAUGUgCCUGGUCCAAGGAACUG | |
| GGAUGCCAGUUCCUUGGACCguuuuagaGCUAGAAAUAGCAAGUUAAAAUAAGGCUAGUCCGU | 1064 |
| UAUCAACUUGAAAAAGUGGCACCGAGUCGgugcAGUUAAUUAUGUgCCUGGUCCAAGGAACUG | |
| G | |
| GGAUGCCAGUUCCUUGGACCguuuuagaGCUAGAAAUAGCAAGUUAAAAUAAGGCUAGUCCGU | 1065 |
| UAUCAACUUGAAAAAGUGGCACCGAGUCGgugcAGUUAAUUAUGUgCCUGGUCCAAGGAACUG | |
| GC | |
| GGAUGCCAGUUCCUUGGACCguuuuagaGCUAGAAAUAGCAAGUUAAAAUAAGGCUAGUCCGU | 1066 |
| UAUCAACUUGAAAAAGUGGCACCGAGUCGgugcAGUUAAUUAUGUgCCUGGUCCAAGGAACUG | |
| GCA | |
| GGAUGCCAGUUCCUUGGACCguuuuagaGCUAGAAAUAGCAAGUUAAAAUAAGGCUAGUCCGU | 1067 |
| UAUCAACUUGAAAAAGUGGCACCGAGUCGgugcAGUUAAUUAUGUgCCUGGUCCAAGGAACUG | |
| GCAU | |
| GGAUGCCAGUUCCUUGGACCguuuuagaGCUAGAAAUAGCAAGUUAAAAUAAGGCUAGUCCGU | 1068 |
| UAUCAACUUGAAAAAGUGGCACCGAGUCGgugcAAGUUAAUUAUGUgCCUGGUCCAAGGAACU | |
| GGAUGCCAGUUCCUUGGACCguuuuagaGCUAGAAAUAGCAAGUUAAAAUAAGGCUAGUCCGU | 1069 |
| UAUCAACUUGAAAAAGUGGCACCGAGUCGgugcAAGUUAAUUAUGUgCCUGGUCCAAGGAACU | |
| G | |
| GGAUGCCAGUUCCUUGGACCguuuuagaGCUAGAAAUAGCAAGUUAAAAUAAGGCUAGUCCGU | 1070 |
| UAUCAACUUGAAAAAGUGGCACCGAGUCGgugcAAGUUAAUUAUGUgCCUGGUCCAAGGAACU | |
| GG | |
| GGAUGCCAGUUCCUUGGACCguuuuagaGCUAGAAAUAGCAAGUUAAAAUAAGGCUAGUCCGU | 1071 |
| UAUCAACUUGAAAAAGUGGCACCGAGUCGgugcAAGUUAAUUAUGUgCCUGGUCCAAGGAACU | |
| GGC | |
| GGAUGCCAGUUCCUUGGACCguuuuagaGCUAGAAAUAGCAAGUUAAAAUAAGGCUAGUCCGU | 1072 |
| UAUCAACUUGAAAAAGUGGCACCGAGUCGgugcAAGUUAAUUAUGUgCCUGGUCCAAGGAACU | |
| GGCA | |
| GGAUGCCAGUUCCUUGGACCguuuuagaGCUAGAAAUAGCAAGUUAAAAUAAGGCUAGUCCGU | 1073 |
| UAUCAACUUGAAAAAGUGGCACCGAGUCGgugcAAGUUAAUUAUGUgCCUGGUCCAAGGAACU | |
| GGCAU | |
| GGAUGCCAGUUCCUUGGACCguuuuagaGCUAGAAAUAGCAAGUUAAAAUAAGGCUAGUCCGU | 1074 |
| UAUCAACUUGAAAAAGUGGCACCGAGUCGgugcAAAGUUAAUUAUGUgCCUGGUCCAAGGAAC | |
| U | |
| GGAUGCCAGUUCCUUGGACCguuuuagaGCUAGAAAUAGCAAGUUAAAAUAAGGCUAGUCCGU | 1075 |
| UAUCAACUUGAAAAAGUGGCACCGAGUCGgugcAAAGUUAAUUAUGUgCCUGGUCCAAGGAAC | |
| UG | |
| GGAUGCCAGUUCCUUGGACCguuuuagaGCUAGAAAUAGCAAGUUAAAAUAAGGCUAGUCCGU | 1076 |
| UAUCAACUUGAAAAAGUGGCACCGAGUCGgugcAAAGUUAAUUAUGUgCCUGGUCCAAGGAAC | |
| UGG | |
| GGAUGCCAGUUCCUUGGACCguuuuagaGCUAGAAAUAGCAAGUUAAAAUAAGGCUAGUCCGU | 1077 |
| UAUCAACUUGAAAAAGUGGCACCGAGUCGgugcAAAGUUAAUUAUGUgCCUGGUCCAAGGAAC | |
| UGGC | |
| GGAUGCCAGUUCCUUGGACCguuuuagaGCUAGAAAUAGCAAGUUAAAAUAAGGCUAGUCCGU | 1078 |
| UAUCAACUUGAAAAAGUGGCACCGAGUCGgugcAAAGUUAAUUAUGUgCCUGGUCCAAGGAAC | |
| UGGCA | |
| GGAUGCCAGUUCCUUGGACCguuuuagaGCUAGAAAUAGCAAGUUAAAAUAAGGCUAGUCCGU | 1079 |
| UAUCAACUUGAAAAAGUGGCACCGAGUCGgugcAAAGUUAAUUAUGUgCCUGGUCCAAGGAAC | |
| UGGCAU | |
| GGAUGCCAGUUCCUUGGACCguuuuagaGCUAGAAAUAGCAAGUUAAAAUAAGGCUAGUCCGU | 1080 |
| UAUCAACUUGAAAAAGUGGCACCGAGUCGgugcUAAAGUUAAUUAUGUgCCUGGUCCAAGGAA | |
| CU | |
| GGAUGCCAGUUCCUUGGACCguuuuagaGCUAGAAAUAGCAAGUUAAAAUAAGGCUAGUCCGU | 1081 |
| UAUCAACUUGAAAAAGUGGCACCGAGUCGgugcUAAAGUUAAUUAUGUgCCUGGUCCAAGGAA | |
| CUG | |
| GGAUGCCAGUUCCUUGGACCguuuuagaGCUAGAAAUAGCAAGUUAAAAUAAGGCUAGUCCGU | 1082 |
| UAUCAACUUGAAAAAGUGGCACCGAGUCGgugcUAAAGUUAAUUAUGUgCCUGGUCCAAGGAA | |
| CUGG | |
| GGAUGCCAGUUCCUUGGACCguuuuagaGCUAGAAAUAGCAAGUUAAAAUAAGGCUAGUCCGU | 1083 |
| UAUCAACUUGAAAAAGUGGCACCGAGUCGgugcUAAAGUUAAUUAUGUgCCUGGUCCAAGGAA | |
| CUGGC | |
| GGAUGCCAGUUCCUUGGACCguuuuagaGCUAGAAAUAGCAAGUUAAAAUAAGGCUAGUCCGU | 1084 |
| UAUCAACUUGAAAAAGUGGCACCGAGUCGgugcUAAAGUUAAUUAUGUgCCUGGUCCAAGGAA | |
| CUGGCA | |
| GGAUGCCAGUUCCUUGGACCguuuuagaGCUAGAAAUAGCAAGUUAAAAUAAGGCUAGUCCGU | 1085 |
| UAUCAACUUGAAAAAGUGGCACCGAGUCGgugcUAAAGUUAAUUAUGUgCCUGGUCCAAGGAA | |
| CUGGCAU | |
| GGAUGCCAGUUCCUUGGACCguuuuagaGCUAGAAAUAGCAAGUUAAAAUAAGGCUAGUCCGU | 1086 |
| UAUCAACUUGAAAAAGUGGCACCGAGUCGgugcCUAAAGUUAAUUAUGUgCCUGGUCCAAGGA | |
| ACU | |
| GGAUGCCAGUUCCUUGGACCguuuuagaGCUAGAAAUAGCAAGUUAAAAUAAGGCUAGUCCGU | 1087 |
| UAUCAACUUGAAAAAGUGGCACCGAGUCGgugcCUAAAGUUAAUUAUGUgCCUGGUCCAAGGA | |
| ACUG | |
| GGAUGCCAGUUCCUUGGACCguuuuagaGCUAGAAAUAGCAAGUUAAAAUAAGGCUAGUCCGU | 1088 |
| UAUCAACUUGAAAAAGUGGCACCGAGUCGgugcCUAAAGUUAAUUAUGUgCCUGGUCCAAGGA | |
| ACUGG | |
| GGAUGCCAGUUCCUUGGACCguuuuagaGCUAGAAAUAGCAAGUUAAAAUAAGGCUAGUCCGU | 1089 |
| UAUCAACUUGAAAAAGUGGCACCGAGUCGgugcCUAAAGUUAAUUAUGUgCCUGGUCCAAGGA | |
| ACUGGC | |
| GGAUGCCAGUUCCUUGGACCguuuuagaGCUAGAAAUAGCAAGUUAAAAUAAGGCUAGUCCGU | 1090 |
| UAUCAACUUGAAAAAGUGGCACCGAGUCGgugcCUAAAGUUAAUUAUGUgCCUGGUCCAAGGA | |
| ACUGGCA | |
| GGAUGCCAGUUCCUUGGACCguuuuagaGCUAGAAAUAGCAAGUUAAAAUAAGGCUAGUCCGU | 1091 |
| UAUCAACUUGAAAAAGUGGCACCGAGUCGgugcCUAAAGUUAAUUAUGUgCCUGGUCCAAGGA | |
| ACUGGCAU | |
| GGAUGCCAGUUCCUUGGACCguuuuagaGCUAGAAAUAGCAAGUUAAAAUAAGGCUAGUCCGU | 1092 |
| UAUCAACUUGAAAAAGUGGCACCGAGUCGgugcCCUAAAGUUAAUUAUGUgCCUGGUCCAAGG | |
| AACU | |
| GGAUGCCAGUUCCUUGGACCguuuuagaGCUAGAAAUAGCAAGUUAAAAUAAGGCUAGUCCGU | 1093 |
| UAUCAACUUGAAAAAGUGGCACCGAGUCGgugcCCUAAAGUUAAUUAUGUgCCUGGUCCAAGG | |
| AACUG | |
| GGAUGCCAGUUCCUUGGACCguuuuagaGCUAGAAAUAGCAAGUUAAAAUAAGGCUAGUCCGU | 1094 |
| UAUCAACUUGAAAAAGUGGCACCGAGUCGgugcCCUAAAGUUAAUUAUGUgCCUGGUCCAAGG | |
| AACUGG | |
| GGAUGCCAGUUCCUUGGACCguuuuagaGCUAGAAAUAGCAAGUUAAAAUAAGGCUAGUCCGU | 1095 |
| UAUCAACUUGAAAAAGUGGCACCGAGUCGgugcCCUAAAGUUAAUUAUGUgCCUGGUCCAAGG | |
| AACUGGC | |
| GGAUGCCAGUUCCUUGGACCguuuuagaGCUAGAAAUAGCAAGUUAAAAUAAGGCUAGUCCGU | 1096 |
| UAUCAACUUGAAAAAGUGGCACCGAGUCGgugcCCUAAAGUUAAUUAUGUgCCUGGUCCAAGG | |
| AACUGGCA | |
| GGAUGCCAGUUCCUUGGACCguuuuagaGCUAGAAAUAGCAAGUUAAAAUAAGGCUAGUCCGU | 1097 |
| UAUCAACUUGAAAAAGUGGCACCGAGUCGgugcCCUAAAGUUAAUUAUGUgCCUGGUCCAAGG | |
| AACUGGCAU | |
| GGAUGCCAGUUCCUUGGACCguuuuagaGCUAGAAAUAGCAAGUUAAAAUAAGGCUAGUCCGU | 1098 |
| UAUCAACUUGAAAAAGUGGCACCGAGUCGgugcACCUAAAGUUAAUUAUGUgCCUGGUCCAAG | |
| GAACU | |
| GGAUGCCAGUUCCUUGGACCguuuuagaGCUAGAAAUAGCAAGUUAAAAUAAGGCUAGUCCGU | 1099 |
| UAUCAACUUGAAAAAGUGGCACCGAGUCGgugcACCUAAAGUUAAUUAUGUgCCUGGUCCAAG | |
| GAACUG | |
| GGAUGCCAGUUCCUUGGACCguuuuagaGCUAGAAAUAGCAAGUUAAAAUAAGGCUAGUCCGU | 1100 |
| UAUCAACUUGAAAAAGUGGCACCGAGUCGgugcACCUAAAGUUAAUUAUGUgCCUGGUCCAAG | |
| GAACUGG | |
| GGAUGCCAGUUCCUUGGACCguuuuagaGCUAGAAAUAGCAAGUUAAAAUAAGGCUAGUCCGU | 1101 |
| UAUCAACUUGAAAAAGUGGCACCGAGUCGgugcACCUAAAGUUAAUUAUGUgCCUGGUCCAAG | |
| GAACUGGC | |
| GGAUGCCAGUUCCUUGGACCguuuuagaGCUAGAAAUAGCAAGUUAAAAUAAGGCUAGUCCGU | 1102 |
| UAUCAACUUGAAAAAGUGGCACCGAGUCGgugcACCUAAAGUUAAUUAUGUgCCUGGUCCAAG | |
| GAACUGGCA | |
| GGAUGCCAGUUCCUUGGACCguuuuagaGCUAGAAAUAGCAAGUUAAAAUAAGGCUAGUCCGU | 1103 |
| UAUCAACUUGAAAAAGUGGCACCGAGUCGgugcACCUAAAGUUAAUUAUGUgCCUGGUCCAAG | |
| GAACUGGCAU | |
| GGAUGCCAGUUCCUUGGACCguuuuagaGCUAGAAAUAGCAAGUUAAAAUAAGGCUAGUCCGU | 1104 |
| UAUCAACUUGAAAAAGUGGCACCGAGUCGgugcUACCUAAAGUUAAUUAUGUgCCUGGUCCAA | |
| GGAACU | |
| GGAUGCCAGUUCCUUGGACCguuuuagaGCUAGAAAUAGCAAGUUAAAAUAAGGCUAGUCCGU | 1105 |
| UAUCAACUUGAAAAAGUGGCACCGAGUCGgugcUACCUAAAGUUAAUUAUGUgCCUGGUCCAA | |
| GGAACUG | |
| GGAUGCCAGUUCCUUGGACCguuuuagaGCUAGAAAUAGCAAGUUAAAAUAAGGCUAGUCCGU | 1106 |
| UAUCAACUUGAAAAAGUGGCACCGAGUCGgugcUACCUAAAGUUAAUUAUGUgCCUGGUCCAA | |
| GGAACUGG | |
| GGAUGCCAGUUCCUUGGACCguuuuagaGCUAGAAAUAGCAAGUUAAAAUAAGGCUAGUCCGU | 1107 |
| UAUCAACUUGAAAAAGUGGCACCGAGUCGgugcUACCUAAAGUUAAUUAUGUgCCUGGUCCAA | |
| GGAACUGGC | |
| GGAUGCCAGUUCCUUGGACCguuuuagaGCUAGAAAUAGCAAGUUAAAAUAAGGCUAGUCCGU | 1108 |
| UAUCAACUUGAAAAAGUGGCACCGAGUCGgugcUACCUAAAGUUAAUUAUGUgCCUGGUCCAA | |
| GGAACUGGCA | |
| GGAUGCCAGUUCCUUGGACCguuuuagaGCUAGAAAUAGCAAGUUAAAAUAAGGCUAGUCCGU | 1109 |
| UAUCAACUUGAAAAAGUGGCACCGAGUCGgugcUACCUAAAGUUAAUUAUGUgCCUGGUCCAA | |
| GGAACUGGCAU | |
| GGAUGCCAGUUCCUUGGACCguuuuagaGCUAGAAAUAGCAAGUUAAAAUAAGGCUAGUCCGU | 1110 |
| UAUCAACUUGAAAAAGUGGCACCGAGUCGgugcAUACCUAAAGUUAAUUAUGUgCCUGGUCCA | |
| AGGAACU | |
| GGAUGCCAGUUCCUUGGACCguuuuagaGCUAGAAAUAGCAAGUUAAAAUAAGGCUAGUCCGU | 1111 |
| UAUCAACUUGAAAAAGUGGCACCGAGUCGgugcAUACCUAAAGUUAAUUAUGUgCCUGGUCCA | |
| AGGAACUG | |
| GGAUGCCAGUUCCUUGGACCguuuuagaGCUAGAAAUAGCAAGUUAAAAUAAGGCUAGUCCGU | 1112 |
| UAUCAACUUGAAAAAGUGGCACCGAGUCGgugcAUACCUAAAGUUAAUUAUGUgCCUGGUCCA | |
| AGGAACUGG | |
| GGAUGCCAGUUCCUUGGACCguuuuagaGCUAGAAAUAGCAAGUUAAAAUAAGGCUAGUCCGU | 1113 |
| UAUCAACUUGAAAAAGUGGCACCGAGUCGgugcAUACCUAAAGUUAAUUAUGUgCCUGGUCCA | |
| AGGAACUGGC | |
| GGAUGCCAGUUCCUUGGACCguuuuagaGCUAGAAAUAGCAAGUUAAAAUAAGGCUAGUCCGU | 1114 |
| UAUCAACUUGAAAAAGUGGCACCGAGUCGgugcAUACCUAAAGUUAAUUAUGUgCCUGGUCCA | |
| AGGAACUGGCA | |
| GGAUGCCAGUUCCUUGGACCguuuuagaGCUAGAAAUAGCAAGUUAAAAUAAGGCUAGUCCGU | 1115 |
| UAUCAACUUGAAAAAGUGGCACCGAGUCGgugcAUACCUAAAGUUAAUUAUGUgCCUGGUCCA | |
| AGGAACUGGCAU | |
| GGAUGCCAGUUCCUUGGACCguuuuagaGCUAGAAAUAGCAAGUUAAAAUAAGGCUAGUCCGU | 1116 |
| UAUCAACUUGAAAAAGUGGCACCGAGUCGgugcAAUACCUAAAGUUAAUUAUGUgCCUGGUCC | |
| AAGGAACU | |
| GGAUGCCAGUUCCUUGGACCguuuuagaGCUAGAAAUAGCAAGUUAAAAUAAGGCUAGUCCGU | 1117 |
| UAUCAACUUGAAAAAGUGGCACCGAGUCGgugcAAUACCUAAAGUUAAUUAUGUgCCUGGUCC | |
| AAGGAACUG | |
| GGAUGCCAGUUCCUUGGACCguuuuagaGCUAGAAAUAGCAAGUUAAAAUAAGGCUAGUCCGU | 1118 |
| UAUCAACUUGAAAAAGUGGCACCGAGUCGgugcAAUACCUAAAGUUAAUUAUGUgCCUGGUCC | |
| AAGGAACUGG | |
| GGAUGCCAGUUCCUUGGACCguuuuagaGCUAGAAAUAGCAAGUUAAAAUAAGGCUAGUCCGU | 1119 |
| UAUCAACUUGAAAAAGUGGCACCGAGUCGgugcAAUACCUAAAGUUAAUUAUGUgCCUGGUCC | |
| AAGGAACUGGC | |
| GGAUGCCAGUUCCUUGGACCguuuuagaGCUAGAAAUAGCAAGUUAAAAUAAGGCUAGUCCGU | 1120 |
| UAUCAACUUGAAAAAGUGGCACCGAGUCGgugcAAUACCUAAAGUUAAUUAUGUgCCUGGUCC | |
| AAGGAACUGGCA | |
| GGAUGCCAGUUCCUUGGACCguuuuagaGCUAGAAAUAGCAAGUUAAAAUAAGGCUAGUCCGU | 1121 |
| UAUCAACUUGAAAAAGUGGCACCGAGUCGgugcAAUACCUAAAGUUAAUUAUGUgCCUGGUCC | |
| AAGGAACUGGCAU | |
| GGAUGCCAGUUCCUUGGACCguuuuagaGCUAGAAAUAGCAAGUUAAAAUAAGGCUAGUCCGU | 1122 |
| UAUCAACUUGAAAAAGUGGCACCGAGUCGgugcAAAUACCUAAAGUUAAUUAUGUgCCUGGUC | |
| CAAGGAACU | |
| GGAUGCCAGUUCCUUGGACCguuuuagaGCUAGAAAUAGCAAGUUAAAAUAAGGCUAGUCCGU | 1123 |
| UAUCAACUUGAAAAAGUGGCACCGAGUCGgugcAAAUACCUAAAGUUAAUUAUGUgCCUGGUC | |
| CAAGGAACUG | |
| GGAUGCCAGUUCCUUGGACCguuuuagaGCUAGAAAUAGCAAGUUAAAAUAAGGCUAGUCCGU | 1124 |
| UAUCAACUUGAAAAAGUGGCACCGAGUCGgugcAAAUACCUAAAGUUAAUUAUGUgCCUGGUC | |
| CAAGGAACUGG | |
| GGAUGCCAGUUCCUUGGACCguuuuagaGCUAGAAAUAGCAAGUUAAAAUAAGGCUAGUCCGU | 1125 |
| UAUCAACUUGAAAAAGUGGCACCGAGUCGgugcAAAUACCUAAAGUUAAUUAUGUgCCUGGUC | |
| CAAGGAACUGGC | |
| GGAUGCCAGUUCCUUGGACCguuuuagaGCUAGAAAUAGCAAGUUAAAAUAAGGCUAGUCCGU | 1126 |
| UAUCAACUUGAAAAAGUGGCACCGAGUCGgugcAAAUACCUAAAGUUAAUUAUGUgCCUGGUC | |
| CAAGGAACUGGCA | |
| GGAUGCCAGUUCCUUGGACCguuuuagaGCUAGAAAUAGCAAGUUAAAAUAAGGCUAGUCCGU | 1127 |
| UAUCAACUUGAAAAAGUGGCACCGAGUCGgugcAAAUACCUAAAGUUAAUUAUGUgCCUGGUC | |
| CAAGGAACUGGCAU | |
| GGAUGCCAGUUCCUUGGACCguuuuagaGCUAGAAAUAGCAAGUUAAAAUAAGGCUAGUCCGU | 1128 |
| UAUCAACUUGAAAAAGUGGCACCGAGUCGgugcUAAAUACCUAAAGUUAAUUAUGUgCCUGGU | |
| CCAAGGAACU | |
| GGAUGCCAGUUCCUUGGACCguuuuagaGCUAGAAAUAGCAAGUUAAAAUAAGGCUAGUCCGU | 1129 |
| UAUCAACUUGAAAAAGUGGCACCGAGUCGgugcUAAAUACCUAAAGUUAAUUAUGUgCCUGGU | |
| CCAAGGAACUG | |
| GGAUGCCAGUUCCUUGGACCguuuuagaGCUAGAAAUAGCAAGUUAAAAUAAGGCUAGUCCGU | 1130 |
| UAUCAACUUGAAAAAGUGGCACCGAGUCGgugcUAAAUACCUAAAGUUAAUUAUGUgCCUGGU | |
| CCAAGGAACUGG | |
| GGAUGCCAGUUCCUUGGACCguuuuagaGCUAGAAAUAGCAAGUUAAAAUAAGGCUAGUCCGU | 1131 |
| UAUCAACUUGAAAAAGUGGCACCGAGUCGgugcUAAAUACCUAAAGUUAAUUAUGUgCCUGGU | |
| CCAAGGAACUGGC | |
| GGAUGCCAGUUCCUUGGACCguuuuagaGCUAGAAAUAGCAAGUUAAAAUAAGGCUAGUCCGU | 1132 |
| UAUCAACUUGAAAAAGUGGCACCGAGUCGgugcUAAAUACCUAAAGUUAAUUAUGUgCCUGGU | |
| CCAAGGAACUGGCA | |
| GGAUGCCAGUUCCUUGGACCguuuuagaGCUAGAAAUAGCAAGUUAAAAUAAGGCUAGUCCGU | 1133 |
| UAUCAACUUGAAAAAGUGGCACCGAGUCGgugcUAAAUACCUAAAGUUAAUUAUGUgCCUGGU | |
| CCAAGGAACUGGCAU | |
| GCUAGGGGAUGCCAGUUCCUguuuuagaGCUAGAAAUAGCAAGUUAAAAUAAGGCUAGUCCGU | 1134 |
| UAUCAACUUGAAAAAGUGGCACCGAGUCGgugcUgCCUGGUCCAAGGAACUGGCAUC | |
| GCUAGGGGAUGCCAGUUCCUguuuuagaGCUAGAAAUAGCAAGUUAAAAUAAGGCUAGUCCGU | 1135 |
| UAUCAACUUGAAAAAGUGGCACCGAGUCGgugcUgCCUGGUCCAAGGAACUGGCAUCC | |
| GCUAGGGGAUGCCAGUUCCUguuuuagaGCUAGAAAUAGCAAGUUAAAAUAAGGCUAGUCCGU | 1136 |
| UAUCAACUUGAAAAAGUGGCACCGAGUCGgugcUgCCUGGUCCAAGGAACUGGCAUCCC | |
| GCUAGGGGAUGCCAGUUCCUguuuuagaGCUAGAAAUAGCAAGUUAAAAUAAGGCUAGUCCGU | 1137 |
| UAUCAACUUGAAAAAGUGGCACCGAGUCGgugcUgCCUGGUCCAAGGAACUGGCAUCCCC | |
| GCUAGGGGAUGCCAGUUCCUguuuuagaGCUAGAAAUAGCAAGUUAAAAUAAGGCUAGUCCGU | 1138 |
| UAUCAACUUGAAAAAGUGGCACCGAGUCGgugcUgCCUGGUCCAAGGAACUGGCAUCCCCU | |
| GCUAGGGGAUGCCAGUUCCUguuuuagaGCUAGAAAUAGCAAGUUAAAAUAAGGCUAGUCCGU | 1139 |
| UAUCAACUUGAAAAAGUGGCACCGAGUCGgugcUgCCUGGUCCAAGGAACUGGCAUCCCCUA | |
| GCUAGGGGAUGCCAGUUCCUguuuuagaGCUAGAAAUAGCAAGUUAAAAUAAGGCUAGUCCGU | 1140 |
| UAUCAACUUGAAAAAGUGGCACCGAGUCGgugcGUgCCUGGUCCAAGGAACUGGCAUC | |
| GCUAGGGGAUGCCAGUUCCUguuuuagaGCUAGAAAUAGCAAGUUAAAAUAAGGCUAGUCCGU | 1141 |
| UAUCAACUUGAAAAAGUGGCACCGAGUCGgugcGUgCCUGGUCCAAGGAACUGGCAUCC | |
| GCUAGGGGAUGCCAGUUCCUguuuuagaGCUAGAAAUAGCAAGUUAAAAUAAGGCUAGUCCGU | 1142 |
| UAUCAACUUGAAAAAGUGGCACCGAGUCGgugcGUgCCUGGUCCAAGGAACUGGCAUCCC | |
| GCUAGGGGAUGCCAGUUCCUguuuuagaGCUAGAAAUAGCAAGUUAAAAUAAGGCUAGUCCGU | 1143 |
| UAUCAACUUGAAAAAGUGGCACCGAGUCGgugcGUgCCUGGUCCAAGGAACUGGCAUCCCC | |
| GCUAGGGGAUGCCAGUUCCUguuuuagaGCUAGAAAUAGCAAGUUAAAAUAAGGCUAGUCCGU | 1144 |
| UAUCAACUUGAAAAAGUGGCACCGAGUCGgugcGUgCCUGGUCCAAGGAACUGGCAUCCCCU | |
| GCUAGGGGAUGCCAGUUCCUguuuuagaGCUAGAAAUAGCAAGUUAAAAUAAGGCUAGUCCGU | 1145 |
| UAUCAACUUGAAAAAGUGGCACCGAGUCGgugcGUgCCUGGUCCAAGGAACUGGCAUCCCCUA | |
| GCUAGGGGAUGCCAGUUCCUguuuuagaGCUAGAAAUAGCAAGUUAAAAUAAGGCUAGUCCGU | 1146 |
| UAUCAACUUGAAAAAGUGGCACCGAGUCGgugcUGUgCCUGGUCCAAGGAACUGGCAUC | |
| GCUAGGGGAUGCCAGUUCCUguuuuagaGCUAGAAAUAGCAAGUUAAAAUAAGGCUAGUCCGU | 1147 |
| UAUCAACUUGAAAAAGUGGCACCGAGUCGgugcUGUgCCUGGUCCAAGGAACUGGCAUCC | |
| GCUAGGGGAUGCCAGUUCCUguuuuagaGCUAGAAAUAGCAAGUUAAAAUAAGGCUAGUCCGU | 1148 |
| UAUCAACUUGAAAAAGUGGCACCGAGUCGgugcUGUgCCUGGUCCAAGGAACUGGCAUCCC | |
| GCUAGGGGAUGCCAGUUCCUguuuuagaGCUAGAAAUAGCAAGUUAAAAUAAGGCUAGUCCGU | 1149 |
| UAUCAACUUGAAAAAGUGGCACCGAGUCGgugcUGUgCCUGGUCCAAGGAACUGGCAUCCCC | |
| GCUAGGGGAUGCCAGUUCCUguuuuagaGCUAGAAAUAGCAAGUUAAAAUAAGGCUAGUCCGU | 1150 |
| UAUCAACUUGAAAAAGUGGCACCGAGUCGgugcUGUgCCUGGUCCAAGGAACUGGCAUCCCCU | |
| GCUAGGGGAUGCCAGUUCCUguuuuagaGCUAGAAAUAGCAAGUUAAAAUAAGGCUAGUCCGU | 1151 |
| UAUCAACUUGAAAAAGUGGCACCGAGUCGgugcUGUgCCUGGUCCAAGGAACUGGCAUCCCCU | |
| A | |
| GCUAGGGGAUGCCAGUUCCUguuuuagaGCUAGAAAUAGCAAGUUAAAAUAAGGCUAGUCCGU | 1152 |
| UAUCAACUUGAAAAAGUGGCACCGAGUCGgugcAUGUgCCUGGUCCAAGGAACUGGCAUC | |
| GCUAGGGGAUGCCAGUUCCUguuuuagaGCUAGAAAUAGCAAGUUAAAAUAAGGCUAGUCCGU | 1153 |
| UAUCAACUUGAAAAAGUGGCACCGAGUCGgugcAUGUgCCUGGUCCAAGGAACUGGCAUCC | |
| GCUAGGGGAUGCCAGUUCCUguuuuagaGCUAGAAAUAGCAAGUUAAAAUAAGGCUAGUCCGU | 1154 |
| UAUCAACUUGAAAAAGUGGCACCGAGUCGgugcAUGUgCCUGGUCCAAGGAACUGGCAUCCC | |
| GCUAGGGGAUGCCAGUUCCUguuuuagaGCUAGAAAUAGCAAGUUAAAAUAAGGCUAGUCCGU | 1155 |
| UAUCAACUUGAAAAAGUGGCACCGAGUCGgugcAUGUgCCUGGUCCAAGGAACUGGCAUCCCC | |
| GCUAGGGGAUGCCAGUUCCUguuuuagaGCUAGAAAUAGCAAGUUAAAAUAAGGCUAGUCCGU | 1156 |
| UAUCAACUUGAAAAAGUGGCACCGAGUCGgugcAUGUgCCUGGUCCAAGGAACUGGCAUCCCC | |
| U | |
| GCUAGGGGAUGCCAGUUCCUguuuuagaGCUAGAAAUAGCAAGUUAAAAUAAGGCUAGUCCGU | 1157 |
| UAUCAACUUGAAAAAGUGGCACCGAGUCGgugcAUGUgCCUGGUCCAAGGAACUGGCAUCCCC | |
| UA | |
| GCUAGGGGAUGCCAGUUCCUguuuuagaGCUAGAAAUAGCAAGUUAAAAUAAGGCUAGUCCGU | 1158 |
| UAUCAACUUGAAAAAGUGGCACCGAGUCGgugcUAUGUgCCUGGUCCAAGGAACUGGCAUC | |
| GCUAGGGGAUGCCAGUUCCUguuuuagaGCUAGAAAUAGCAAGUUAAAAUAAGGCUAGUCCGU | 1159 |
| UAUCAACUUGAAAAAGUGGCACCGAGUCGgugcUAUGUgCCUGGUCCAAGGAACUGGCAUCC | |
| GCUAGGGGAUGCCAGUUCCUguuuuagaGCUAGAAAUAGCAAGUUAAAAUAAGGCUAGUCCGU | 1160 |
| UAUCAACUUGAAAAAGUGGCACCGAGUCGgugcUAUGUgCCUGGUCCAAGGAACUGGCAUCCC | |
| GCUAGGGGAUGCCAGUUCCUguuuuagaGCUAGAAAUAGCAAGUUAAAAUAAGGCUAGUCCGU | 1161 |
| UAUCAACUUGAAAAAGUGGCACCGAGUCGgugcUAUGUgCCUGGUCCAAGGAACUGGCAUCCC | |
| C | |
| GCUAGGGGAUGCCAGUUCCUguuuuagaGCUAGAAAUAGCAAGUUAAAAUAAGGCUAGUCCGU | 1162 |
| UAUCAACUUGAAAAAGUGGCACCGAGUCGgugcUAUGUgCCUGGUCCAAGGAACUGGCAUCCC | |
| CU | |
| GCUAGGGGAUGCCAGUUCCUguuuuagaGCUAGAAAUAGCAAGUUAAAAUAAGGCUAGUCCGU | 1163 |
| UAUCAACUUGAAAAAGUGGCACCGAGUCGgugcUAUGUgCCUGGUCCAAGGAACUGGCAUCCC | |
| CUA | |
| GCUAGGGGAUGCCAGUUCCUguuuuagaGCUAGAAAUAGCAAGUUAAAAUAAGGCUAGUCCGU | 1164 |
| UAUCAACUUGAAAAAGUGGCACCGAGUCGgugcUUAUGUgCCUGGUCCAAGGAACUGGCAUC | |
| GCUAGGGGAUGCCAGUUCCUguuuuagaGCUAGAAAUAGCAAGUUAAAAUAAGGCUAGUCCGU | 1165 |
| UAUCAACUUGAAAAAGUGGCACCGAGUCGgugcUUAUGUgCCUGGUCCAAGGAACUGGCAUCC | |
| GCUAGGGGAUGCCAGUUCCUguuuuagaGCUAGAAAUAGCAAGUUAAAAUAAGGCUAGUCCGU | 1166 |
| UAUCAACUUGAAAAAGUGGCACCGAGUCGgugcUUAUGUgCCUGGUCCAAGGAACUGGCAUCC | |
| C | |
| GCUAGGGGAUGCCAGUUCCUguuuuagaGCUAGAAAUAGCAAGUUAAAAUAAGGCUAGUCCGU | 1167 |
| UAUCAACUUGAAAAAGUGGCACCGAGUCGgugcUUAUGUgCCUGGUCCAAGGAACUGGCAUCC | |
| cc | |
| GCUAGGGGAUGCCAGUUCCUguuuuagaGCUAGAAAUAGCAAGUUAAAAUAAGGCUAGUCCGU | 1168 |
| UAUCAACUUGAAAAAGUGGCACCGAGUCGgugcUUAUGUgCCUGGUCCAAGGAACUGGCAUCC | |
| CCU | |
| GCUAGGGGAUGCCAGUUCCUguuuuagaGCUAGAAAUAGCAAGUUAAAAUAAGGCUAGUCCGU | 1169 |
| UAUCAACUUGAAAAAGUGGCACCGAGUCGgugcUUAUGUgCCUGGUCCAAGGAACUGGCAUCC | |
| CCUA | |
| GCUAGGGGAUGCCAGUUCCUguuuuagaGCUAGAAAUAGCAAGUUAAAAUAAGGCUAGUCCGU | 1170 |
| UAUCAACUUGAAAAAGUGGCACCGAGUCGgugcAUUAUGUgCCUGGUCCAAGGAACUGGCAUC | |
| GCUAGGGGAUGCCAGUUCCUguuuuagaGCUAGAAAUAGCAAGUUAAAAUAAGGCUAGUCCGU | 1171 |
| UAUCAACUUGAAAAAGUGGCACCGAGUCGgugcAUUAUGUgCCUGGUCCAAGGAACUGGCAUC | |
| C | |
| GCUAGGGGAUGCCAGUUCCUguuuuagaGCUAGAAAUAGCAAGUUAAAAUAAGGCUAGUCCGU | 1172 |
| UAUCAACUUGAAAAAGUGGCACCGAGUCGgugcAUUAUGUgCCUGGUCCAAGGAACUGGCAUC | |
| CC | |
| GCUAGGGGAUGCCAGUUCCUguuuuagaGCUAGAAAUAGCAAGUUAAAAUAAGGCUAGUCCGU | 1173 |
| UAUCAACUUGAAAAAGUGGCACCGAGUCGgugcAUUAUGUgCCUGGUCCAAGGAACUGGCAUC | |
| CCC | |
| GCUAGGGGAUGCCAGUUCCUguuuuagaGCUAGAAAUAGCAAGUUAAAAUAAGGCUAGUCCGU | 1174 |
| UAUCAACUUGAAAAAGUGGCACCGAGUCGgugcAUUAUGUgCCUGGUCCAAGGAACUGGCAUC | |
| CCCU | |
| GCUAGGGGAUGCCAGUUCCUguuuuagaGCUAGAAAUAGCAAGUUAAAAUAAGGCUAGUCCGU | 1175 |
| UAUCAACUUGAAAAAGUGGCACCGAGUCGgugcAUUAUGUgCCUGGUCCAAGGAACUGGCAUC | |
| CCCUA | |
| GCUAGGGGAUGCCAGUUCCUguuuuagaGCUAGAAAUAGCAAGUUAAAAUAAGGCUAGUCCGU | 1176 |
| UAUCAACUUGAAAAAGUGGCACCGAGUCGgugcAAUUAUGUgCCUGGUCCAAGGAACUGGCAU | |
| C | |
| GCUAGGGGAUGCCAGUUCCUguuuuagaGCUAGAAAUAGCAAGUUAAAAUAAGGCUAGUCCGU | 1177 |
| UAUCAACUUGAAAAAGUGGCACCGAGUCGgugcAAUUAUGUgCCUGGUCCAAGGAACUGGCAU | |
| CC | |
| GCUAGGGGAUGCCAGUUCCUguuuuagaGCUAGAAAUAGCAAGUUAAAAUAAGGCUAGUCCGU | 1178 |
| UAUCAACUUGAAAAAGUGGCACCGAGUCGgugcAAUUAUGUgCCUGGUCCAAGGAACUGGCAU | |
| CCC | |
| GCUAGGGGAUGCCAGUUCCUguuuuagaGCUAGAAAUAGCAAGUUAAAAUAAGGCUAGUCCGU | 1179 |
| UAUCAACUUGAAAAAGUGGCACCGAGUCGgugcAAUUAUGUgCCUGGUCCAAGGAACUGGCAU | |
| CCCC | |
| GCUAGGGGAUGCCAGUUCCUguuuuagaGCUAGAAAUAGCAAGUUAAAAUAAGGCUAGUCCGU | 1180 |
| UAUCAACUUGAAAAAGUGGCACCGAGUCGgugcAAUUAUGUgCCUGGUCCAAGGAACUGGCAU | |
| CCCCU | |
| GCUAGGGGAUGCCAGUUCCUguuuuagaGCUAGAAAUAGCAAGUUAAAAUAAGGCUAGUCCGU | 1181 |
| UAUCAACUUGAAAAAGUGGCACCGAGUCGgugcAAUUAUGUgCCUGGUCCAAGGAACUGGCAU | |
| CCCCUA | |
| GCUAGGGGAUGCCAGUUCCUguuuuagaGCUAGAAAUAGCAAGUUAAAAUAAGGCUAGUCCGU | 1182 |
| UAUCAACUUGAAAAAGUGGCACCGAGUCGgugcUAAUUAUGUgCCUGGUCCAAGGAACUGGCA | |
| UC | |
| GCUAGGGGAUGCCAGUUCCUguuuuagaGCUAGAAAUAGCAAGUUAAAAUAAGGCUAGUCCGU | 1183 |
| UAUCAACUUGAAAAAGUGGCACCGAGUCGgugcUAAUUAUGUgCCUGGUCCAAGGAACUGGCA | |
| UCC | |
| GCUAGGGGAUGCCAGUUCCUguuuuagaGCUAGAAAUAGCAAGUUAAAAUAAGGCUAGUCCGU | 1184 |
| UAUCAACUUGAAAAAGUGGCACCGAGUCGgugcUAAUUAUGUgCCUGGUCCAAGGAACUGGCA | |
| UCCC | |
| GCUAGGGGAUGCCAGUUCCUguuuuagaGCUAGAAAUAGCAAGUUAAAAUAAGGCUAGUCCGU | 1185 |
| UAUCAACUUGAAAAAGUGGCACCGAGUCGgugcUAAUUAUGUgCCUGGUCCAAGGAACUGGCA | |
| UCCCC | |
| GCUAGGGGAUGCCAGUUCCUguuuuagaGCUAGAAAUAGCAAGUUAAAAUAAGGCUAGUCCGU | 1186 |
| UAUCAACUUGAAAAAGUGGCACCGAGUCGgugcUAAUUAUGUgCCUGGUCCAAGGAACUGGCA | |
| UCCCCU | |
| GCUAGGGGAUGCCAGUUCCUguuuuagaGCUAGAAAUAGCAAGUUAAAAUAAGGCUAGUCCGU | 1187 |
| UAUCAACUUGAAAAAGUGGCACCGAGUCGgugcUAAUUAUGUgCCUGGUCCAAGGAACUGGCA | |
| UCCCCUA | |
| GCUAGGGGAUGCCAGUUCCUguuuuagaGCUAGAAAUAGCAAGUUAAAAUAAGGCUAGUCCGU | 1188 |
| UAUCAACUUGAAAAAGUGGCACCGAGUCGgugcUUAAUUAUGUgCCUGGUCCAAGGAACUGGC | |
| AUC | |
| GCUAGGGGAUGCCAGUUCCUguuuuagaGCUAGAAAUAGCAAGUUAAAAUAAGGCUAGUCCGU | 1189 |
| UAUCAACUUGAAAAAGUGGCACCGAGUCGgugcUUAAUUAUGUgCCUGGUCCAAGGAACUGGC | |
| AUCC | |
| GCUAGGGGAUGCCAGUUCCUguuuuagaGCUAGAAAUAGCAAGUUAAAAUAAGGCUAGUCCGU | 1190 |
| UAUCAACUUGAAAAAGUGGCACCGAGUCGgugcUUAAUUAUGUgCCUGGUCCAAGGAACUGGC | |
| AUCCC | |
| GCUAGGGGAUGCCAGUUCCUguuuuagaGCUAGAAAUAGCAAGUUAAAAUAAGGCUAGUCCGU | 1191 |
| UAUCAACUUGAAAAAGUGGCACCGAGUCGgugcUUAAUUAUGUgCCUGGUCCAAGGAACUGGC | |
| AUCCCC | |
| GCUAGGGGAUGCCAGUUCCUguuuuagaGCUAGAAAUAGCAAGUUAAAAUAAGGCUAGUCCGU | 1192 |
| UAUCAACUUGAAAAAGUGGCACCGAGUCGgugcUUAAUUAUGUgCCUGGUCCAAGGAACUGGC | |
| AUCCCCU | |
| GCUAGGGGAUGCCAGUUCCUguuuuagaGCUAGAAAUAGCAAGUUAAAAUAAGGCUAGUCCGU | 1193 |
| UAUCAACUUGAAAAAGUGGCACCGAGUCGgugcUUAAUUAUGUgCCUGGUCCAAGGAACUGGC | |
| AUCCCCUA | |
| GCUAGGGGAUGCCAGUUCCUguuuuagaGCUAGAAAUAGCAAGUUAAAAUAAGGCUAGUCCGU | 1194 |
| UAUCAACUUGAAAAAGUGGCACCGAGUCGgugcGUUAAUUAUGUgCCUGGUCCAAGGAACUGG | |
| CAUC | |
| GCUAGGGGAUGCCAGUUCCUguuuuagaGCUAGAAAUAGCAAGUUAAAAUAAGGCUAGUCCGU | 1195 |
| UAUCAACUUGAAAAAGUGGCACCGAGUCGgugcGUUAAUUAUGUgCCUGGUCCAAGGAACUGG | |
| CAUCC | |
| GCUAGGGGAUGCCAGUUCCUguuuuagaGCUAGAAAUAGCAAGUUAAAAUAAGGCUAGUCCGU | 1196 |
| UAUCAACUUGAAAAAGUGGCACCGAGUCGgugcGUUAAUUAUGUgCCUGGUCCAAGGAACUGG | |
| CAUCCC | |
| GCUAGGGGAUGCCAGUUCCUguuuuagaGCUAGAAAUAGCAAGUUAAAAUAAGGCUAGUCCGU | 1197 |
| UAUCAACUUGAAAAAGUGGCACCGAGUCGgugcGUUAAUUAUGUgCCUGGUCCAAGGAACUGG | |
| CAUCCCC | |
| GCUAGGGGAUGCCAGUUCCUguuuuagaGCUAGAAAUAGCAAGUUAAAAUAAGGCUAGUCCGU | 1198 |
| UAUCAACUUGAAAAAGUGGCACCGAGUCGgugcGUUAAUUAUGUgCCUGGUCCAAGGAACUGG | |
| CAUCCCCU | |
| GCUAGGGGAUGCCAGUUCCUguuuuagaGCUAGAAAUAGCAAGUUAAAAUAAGGCUAGUCCGU | 1199 |
| UAUCAACUUGAAAAAGUGGCACCGAGUCGgugcGUUAAUUAUGUgCCUGGUCCAAGGAACUGG | |
| CAUCCCCUA | |
| GCUAGGGGAUGCCAGUUCCUguuuuagaGCUAGAAAUAGCAAGUUAAAAUAAGGCUAGUCCGU | 1200 |
| UAUCAACUUGAAAAAGUGGCACCGAGUCGgugcAGUUAAUUAUGUgCCUGGUCCAAGGAACUG | |
| GCAUC | |
| GCUAGGGGAUGCCAGUUCCUguuuuagaGCUAGAAAUAGCAAGUUAAAAUAAGGCUAGUCCGU | 1201 |
| UAUCAACUUGAAAAAGUGGCACCGAGUCGgugcAGUUAAUUAUGUgCCUGGUCCAAGGAACUG | |
| GCAUCC | |
| GCUAGGGGAUGCCAGUUCCUguuuuagaGCUAGAAAUAGCAAGUUAAAAUAAGGCUAGUCCGU | 1202 |
| UAUCAACUUGAAAAAGUGGCACCGAGUCGgugcAGUUAAUUAUGUgCCUGGUCCAAGGAACUG | |
| GCAUCCC | |
| GCUAGGGGAUGCCAGUUCCUguuuuagaGCUAGAAAUAGCAAGUUAAAAUAAGGCUAGUCCGU | 1203 |
| UAUCAACUUGAAAAAGUGGCACCGAGUCGgugcAGUUAAUUAUGUgCCUGGUCCAAGGAACUG | |
| GCAUCCCC | |
| GCUAGGGGAUGCCAGUUCCUguuuuagaGCUAGAAAUAGCAAGUUAAAAUAAGGCUAGUCCGU | 1204 |
| UAUCAACUUGAAAAAGUGGCACCGAGUCGgugcAGUUAAUUAUGUgCCUGGUCCAAGGAACUG | |
| GCAUCCCCU | |
| GCUAGGGGAUGCCAGUUCCUguuuuagaGCUAGAAAUAGCAAGUUAAAAUAAGGCUAGUCCGU | 1205 |
| UAUCAACUUGAAAAAGUGGCACCGAGUCGgugcAGUUAAUUAUGUgCCUGGUCCAAGGAACUG | |
| GCAUCCCCUA | |
| GCUAGGGGAUGCCAGUUCCUguuuuagaGCUAGAAAUAGCAAGUUAAAAUAAGGCUAGUCCGU | 1206 |
| UAUCAACUUGAAAAAGUGGCACCGAGUCGgugcAAGUUAAUUAUGUgCCUGGUCCAAGGAACU | |
| GGCAUC | |
| GCUAGGGGAUGCCAGUUCCUguuuuagaGCUAGAAAUAGCAAGUUAAAAUAAGGCUAGUCCGU | 1207 |
| UAUCAACUUGAAAAAGUGGCACCGAGUCGgugcAAGUUAAUUAUGUgCCUGGUCCAAGGAACU | |
| GGCAUCC | |
| GCUAGGGGAUGCCAGUUCCUguuuuagaGCUAGAAAUAGCAAGUUAAAAUAAGGCUAGUCCGU | 1208 |
| UAUCAACUUGAAAAAGUGGCACCGAGUCGgugcAAGUUAAUUAUGUgCCUGGUCCAAGGAACU | |
| GGCAUCCC | |
| GCUAGGGGAUGCCAGUUCCUguuuuagaGCUAGAAAUAGCAAGUUAAAAUAAGGCUAGUCCGU | 1209 |
| UAUCAACUUGAAAAAGUGGCACCGAGUCGgugcAAGUUAAUUAUGUgCCUGGUCCAAGGAACU | |
| GGCAUCCCC | |
| GCUAGGGGAUGCCAGUUCCUguuuuagaGCUAGAAAUAGCAAGUUAAAAUAAGGCUAGUCCGU | 1210 |
| UAUCAACUUGAAAAAGUGGCACCGAGUCGgugcAAGUUAAUUAUGUgCCUGGUCCAAGGAACU | |
| GGCAUCCCCU | |
| GCUAGGGGAUGCCAGUUCCUguuuuagaGCUAGAAAUAGCAAGUUAAAAUAAGGCUAGUCCGU | 1211 |
| UAUCAACUUGAAAAAGUGGCACCGAGUCGgugcAAGUUAAUUAUGUgCCUGGUCCAAGGAACU | |
| GGCAUCCCCUA | |
| GCUAGGGGAUGCCAGUUCCUguuuuagaGCUAGAAAUAGCAAGUUAAAAUAAGGCUAGUCCGU | 1212 |
| UAUCAACUUGAAAAAGUGGCACCGAGUCGgugcAAAGUUAAUUAUGUgCCUGGUCCAAGGAAC | |
| UGGCAUC | |
| GCUAGGGGAUGCCAGUUCCUguuuuagaGCUAGAAAUAGCAAGUUAAAAUAAGGCUAGUCCGU | 1213 |
| UAUCAACUUGAAAAAGUGGCACCGAGUCGgugcAAAGUUAAUUAUGUgCCUGGUCCAAGGAAC | |
| UGGCAUCC | |
| GCUAGGGGAUGCCAGUUCCUguuuuagaGCUAGAAAUAGCAAGUUAAAAUAAGGCUAGUCCGU | 1214 |
| UAUCAACUUGAAAAAGUGGCACCGAGUCGgugcAAAGUUAAUUAUGUgCCUGGUCCAAGGAAC | |
| UGGCAUCCC | |
| GCUAGGGGAUGCCAGUUCCUguuuuagaGCUAGAAAUAGCAAGUUAAAAUAAGGCUAGUCCGU | 1215 |
| UAUCAACUUGAAAAAGUGGCACCGAGUCGgugcAAAGUUAAUUAUGUgCCUGGUCCAAGGAAC | |
| UGGCAUCCCC | |
| GCUAGGGGAUGCCAGUUCCUguuuuagaGCUAGAAAUAGCAAGUUAAAAUAAGGCUAGUCCGU | 1216 |
| UAUCAACUUGAAAAAGUGGCACCGAGUCGgugcAAAGUUAAUUAUGUgCCUGGUCCAAGGAAC | |
| UGGCAUCCCCU | |
| GCUAGGGGAUGCCAGUUCCUguuuuagaGCUAGAAAUAGCAAGUUAAAAUAAGGCUAGUCCGU | 1217 |
| UAUCAACUUGAAAAAGUGGCACCGAGUCGgugcAAAGUUAAUUAUGUgCCUGGUCCAAGGAAC | |
| UGGCAUCCCCUA | |
| GCUAGGGGAUGCCAGUUCCUguuuuagaGCUAGAAAUAGCAAGUUAAAAUAAGGCUAGUCCGU | 1218 |
| UAUCAACUUGAAAAAGUGGCACCGAGUCGgugcUAAAGUUAAUUAUGUgCCUGGUCCAAGGAA | |
| CUGGCAUC | |
| GCUAGGGGAUGCCAGUUCCUguuuuagaGCUAGAAAUAGCAAGUUAAAAUAAGGCUAGUCCGU | 1219 |
| UAUCAACUUGAAAAAGUGGCACCGAGUCGgugcUAAAGUUAAUUAUGUgCCUGGUCCAAGGAA | |
| CUGGCAUCC | |
| GCUAGGGGAUGCCAGUUCCUguuuuagaGCUAGAAAUAGCAAGUUAAAAUAAGGCUAGUCCGU | 1220 |
| UAUCAACUUGAAAAAGUGGCACCGAGUCGgugcUAAAGUUAAUUAUGUgCCUGGUCCAAGGAA | |
| CUGGCAUCCC | |
| GCUAGGGGAUGCCAGUUCCUguuuuagaGCUAGAAAUAGCAAGUUAAAAUAAGGCUAGUCCGU | 1221 |
| UAUCAACUUGAAAAAGUGGCACCGAGUCGgugcUAAAGUUAAUUAUGUgCCUGGUCCAAGGAA | |
| CUGGCAUCCCC | |
| GCUAGGGGAUGCCAGUUCCUguuuuagaGCUAGAAAUAGCAAGUUAAAAUAAGGCUAGUCCGU | 1222 |
| UAUCAACUUGAAAAAGUGGCACCGAGUCGgugcUAAAGUUAAUUAUGUgCCUGGUCCAAGGAA | |
| CUGGCAUCCCCU | |
| GCUAGGGGAUGCCAGUUCCUguuuuagaGCUAGAAAUAGCAAGUUAAAAUAAGGCUAGUCCGU | 1223 |
| UAUCAACUUGAAAAAGUGGCACCGAGUCGgugcUAAAGUUAAUUAUGUgCCUGGUCCAAGGAA | |
| CUGGCAUCCCCUA | |
| GCUAGGGGAUGCCAGUUCCUguuuuagaGCUAGAAAUAGCAAGUUAAAAUAAGGCUAGUCCGU | 1224 |
| UAUCAACUUGAAAAAGUGGCACCGAGUCGgugcCUAAAGUUAAUUAUGUgCCUGGUCCAAGGA | |
| ACUGGCAUC | |
| GCUAGGGGAUGCCAGUUCCUguuuuagaGCUAGAAAUAGCAAGUUAAAAUAAGGCUAGUCCGU | 1225 |
| UAUCAACUUGAAAAAGUGGCACCGAGUCGgugcCUAAAGUUAAUUAUGUgCCUGGUCCAAGGA | |
| ACUGGCAUCC | |
| GCUAGGGGAUGCCAGUUCCUguuuuagaGCUAGAAAUAGCAAGUUAAAAUAAGGCUAGUCCGU | 1226 |
| UAUCAACUUGAAAAAGUGGCACCGAGUCGgugcCUAAAGUUAAUUAUGUgCCUGGUCCAAGGA | |
| ACUGGCAUCCC | |
| GCUAGGGGAUGCCAGUUCCUguuuuagaGCUAGAAAUAGCAAGUUAAAAUAAGGCUAGUCCGU | 1227 |
| UAUCAACUUGAAAAAGUGGCACCGAGUCGgugcCUAAAGUUAAUUAUGUgCCUGGUCCAAGGA | |
| ACUGGCAUCCCC | |
| GCUAGGGGAUGCCAGUUCCUguuuuagaGCUAGAAAUAGCAAGUUAAAAUAAGGCUAGUCCGU | 1228 |
| UAUCAACUUGAAAAAGUGGCACCGAGUCGgugcCUAAAGUUAAUUAUGUgCCUGGUCCAAGGA | |
| ACUGGCAUCCCCU | |
| GCUAGGGGAUGCCAGUUCCUguuuuagaGCUAGAAAUAGCAAGUUAAAAUAAGGCUAGUCCGU | 1229 |
| UAUCAACUUGAAAAAGUGGCACCGAGUCGgugcCUAAAGUUAAUUAUGUgCCUGGUCCAAGGA | |
| ACUGGCAUCCCCUA | |
| GCUAGGGGAUGCCAGUUCCUguuuuagaGCUAGAAAUAGCAAGUUAAAAUAAGGCUAGUCCGU | 1230 |
| UAUCAACUUGAAAAAGUGGCACCGAGUCGgugcCCUAAAGUUAAUUAUGUgCCUGGUCCAAGG | |
| AACUGGCAUC | |
| GCUAGGGGAUGCCAGUUCCUguuuuagaGCUAGAAAUAGCAAGUUAAAAUAAGGCUAGUCCGU | 1231 |
| UAUCAACUUGAAAAAGUGGCACCGAGUCGgugcCCUAAAGUUAAUUAUGUgCCUGGUCCAAGG | |
| AACUGGCAUCC | |
| GCUAGGGGAUGCCAGUUCCUguuuuagaGCUAGAAAUAGCAAGUUAAAAUAAGGCUAGUCCGU | 1232 |
| UAUCAACUUGAAAAAGUGGCACCGAGUCGgugcCCUAAAGUUAAUUAUGUgCCUGGUCCAAGG | |
| AACUGGCAUCCC | |
| GCUAGGGGAUGCCAGUUCCUguuuuagaGCUAGAAAUAGCAAGUUAAAAUAAGGCUAGUCCGU | 1233 |
| UAUCAACUUGAAAAAGUGGCACCGAGUCGgugcCCUAAAGUUAAUUAUGUgCCUGGUCCAAGG | |
| AACUGGCAUCCCC | |
| GCUAGGGGAUGCCAGUUCCUguuuuagaGCUAGAAAUAGCAAGUUAAAAUAAGGCUAGUCCGU | 1234 |
| UAUCAACUUGAAAAAGUGGCACCGAGUCGgugcCCUAAAGUUAAUUAUGUgCCUGGUCCAAGG | |
| AACUGGCAUCCCCU | |
| GCUAGGGGAUGCCAGUUCCUguuuuagaGCUAGAAAUAGCAAGUUAAAAUAAGGCUAGUCCGU | 1235 |
| UAUCAACUUGAAAAAGUGGCACCGAGUCGgugcCCUAAAGUUAAUUAUGUgCCUGGUCCAAGG | |
| AACUGGCAUCCCCUA | |

TABLE 13
Nicking RNA (nRNA) sequences.

| Represent | | | | | |
|---|---|---|---|---|---|
| ative | | | | | |
| spacer of | | | | | |
| a pegRNA | | | | | |
| with which | | | | | |
| the nRNA | | | | nickRNA | |
| may be | SEQ ID | | SEQ ID | (nRNA) | SEQ ID |
| used | NO | nRNA sequence | NO | spacer | NO |
| CCUAAAG | 1236 | caccGUAAUUCUAAAAGUAUGAUGUagaGC | 1308 | UAAUUCU | 1380 |
| UUAAUUA | | UAGAAAUAGCAAGUUAAAAUAAGGCUAGUC | | AAAAGUA | |
| UGUACC | | CGUUAUCAACUUGAAAAAGUGGCACCGAGU | | UGAUGU | |
| | | CG | | | |
| CCUAAAG | 1237 | caccGACUUUAGGUAUUUAUUCUGCagaGC | 1309 | ACUUUAG | 1381 |
| UUAAUUA | | UAGAAAUAGCAAGUUAAAAUAAGGCUAGUC | | GUAUUUA | |
| UGUACC | | CGUUAUCAACUUGAAAAAGUGGCACCGAGU | | UUCUGC | |
| | | CG | | | |
| CCUAAAG | 1238 | caccGCCAGGCACAUAAUUAACUUUagaGC | 1310 | GCCAGGA | 1382 |
| UUAAUUA | | UAGAAAUAGCAAGUUAAAAUAAGGCUAGUC | | CAUAAUU | |
| UGUACC | | CGUUAUCAACUUGAAAAAGUGGCACCGAGU | | AACUUU | |
| | | CG | | | |
| CCUAAAG | 1239 | caccGGAUGCCAGUUCCUUGGACCagaGCU | 1311 | GGAUGCC | 1383 |
| UUAAUUA | | AGAAAUAGCAAGUUAAAAUAAGGCUAGUCC | | AGUUCCU | |
| UGUACC | | GUUAUCAACUUGAAAAAGUGGCACCGAGUC | | UGGACC | |
| | | G | | | |
| CCUAAAG | 1240 | caccGCUAGGGGAUGCCAGUUCCUagaGCU | 1312 | GCUAGGG | 1384 |
| UUAAUUA | | AGAAAUAGCAAGUUAAAAUAAGGCUAGUCC | | GAUGCCA | |
| UGUACC | | GUUAUCAACUUGAAAAAGUGGCACCGAGUC | | GUUCCU | |
| | | G | | | |
| CCUAAAG | 1241 | caccGUGGGCAGCAGUAAGGGCUAGagaGC | 1313 | UGGGCAG | 1385 |
| UUAAUUA | | UAGAAAUAGCAAGUUAAAAUAAGGCUAGUC | | CAGUAAG | |
| UGUACC | | CGUUAUCAACUUGAAAAAGUGGCACCGAGU | | GGCUAG | |
| | | CG | | | |
| CCUAAAG | 1242 | caccGUUGGGCAGCAGUAAGGGCUAagaGC | 1314 | UUGGGCA | 1386 |
| UUAAUUA | | UAGAAAUAGCAAGUUAAAAUAAGGCUAGUC | | GCAGUAA | |
| UGUACC | | CGUUAUCAACUUGAAAAAGUGGCACCGAGU | | GGGCUA | |
| | | CG | | | |
| CCUAAAG | 1243 | caccGUUUGGGCAGCAGUAAGGGCUagaGC | 1315 | UUUGGGC | 1387 |
| UUAAUUA | | UAGAAAUAGCAAGUUAAAAUAAGGCUAGUC | | AGCAGUA | |
| UGUACC | | CGUUAUCAACUUGAAAAAGUGGCACCGAGU | | AGGGCU | |
| | | CG | | | |
| CCUAAAG | 1244 | caccGCAAUCUUUGGGCAGCAGUAAagaGC | 1316 | CAAUCUU | 1388 |
| UUAAUUA | | UAGAAAUAGCAAGUUAAAAUAAGGCUAGUC | | UGGGCAG | |
| UGUACC | | CGUUAUCAACUUGAAAAAGUGGCACCGAGU | | CAGUAA | |
| | | CG | | | |
| CCUAAAG | 1245 | caccGCCAAUCUUUGGGCAGCAGUAagaGC | 1317 | CCAAUCU | 1389 |
| UUAAUUA | | UAGAAAUAGCAAGUUAAAAUAAGGCUAGUC | | UUGGGCA | |
| UGUACC | | CGUUAUCAACUUGAAAAAGUGGCACCGAGU | | GCAGUA | |
| | | CG | | | |
| CCUAAAG | 1246 | caccGCAACUCUCUUCCAAUCUUUagaGCU | 1318 | GCAACUC | 1390 |
| UUAAUUA | | AGAAAUAGCAAGUUAAAAUAAGGCUAGUCC | | UCUUCCA | |
| UGUACC | | GUUAUCAACUUGAAAAAGUGGCACCGAGUC | | AUCUUU | |
| | | G | | | |
| CCUAAAG | 1247 | caccGAGCAACUCUCUUCCAAUCUUagaGC | 1319 | AGCAACU | 1391 |
| UUAAUUA | | UAGAAAUAGCAAGUUAAAAUAAGGCUAGUC | | CUCUUCC | |
| UGUACC | | CGUUAUCAACUUGAAAAAGUGGCACCGAGU | | AAUCUU | |
| | | CG | | | |
| GGAUGCC | 1248 | caccGCCUAAAGUUAAUUAUGUgCCagaGC | 1320 | CCUAAAG | 1392 |
| AGUUCCU | | UAGAAAUAGCAAGUUAAAAUAAGGCUAGUC | | UUAAUUA | |
| UGGACC | | CGUUAUCAACUUGAAAAAGUGGCACCGAGU | | UGUgCC | |
| | | CG | | | |
| GGAUGCC | 1249 | caccGUUAAUUAUGUgCCUGGUCCAagaGC | 1321 | UUAAUUA | 1393 |
| AGUUCCU | | UAGAAAUAGCAAGUUAAAAUAAGGCUAGUC | | UGUgCCU | |
| UGGACC | | CGUUAUCAACUUGAAAAAGUGGCACCGAGU | | GGUCCA | |
| | | CG | | | |
| GGAUGCC | 1250 | caccGAUGUgCCUGGUCCAAGGAACagaGC | 1322 | AUGUgCC | 1394 |
| AGUUCCU | | UAGAAAUAGCAAGUUAAAAUAAGGCUAGUC | | UGGUCCA | |
| UGGACC | | CGUUAUCAACUUGAAAAAGUGGCACCGAGU | | AGGAAC | |
| | | CG | | | |
| GGAUGCC | 1251 | caccGCCUUACUGCUGCCCAAAGAUagaGC | 1323 | CCUUACU | 1395 |
| AGUUCCU | | UAGAAAUAGCAAGUUAAAAUAAGGCUAGUC | | GCUGCCC | |
| UGGACC | | CGUUAUCAACUUGAAAAAGUGGCACCGAGU | | AAAGAU | |
| | | CG | | | |
| GGAUGCC | 1252 | caccGAGAUUGGAAGAGAGUUGCUGagaGC | 1324 | AGAUUGG | 1396 |
| AGUUCCU | | UAGAAAUAGCAAGUUAAAAUAAGGCUAGUC | | AAGAGAG | |
| UGGACC | | CGUUAUCAACUUGAAAAAGUGGCACCGAGU | | UUGCUG | |
| | | CG | | | |
| GGAUGCC | 1253 | caccGAAGAGAGUUGCUGAGGAUUCagaGC | 1325 | AAGAGAG | 1397 |
| AGUUCCU | | UAGAAAUAGCAAGUUAAAAUAAGGCUAGUC | | UUGCUGA | |
| UGGACC | | CGUUAUCAACUUGAAAAAGUGGCACCGAGU | | GGAUUC | |
| | | CG | | | |
| GCUAGGG | 1254 | caccGCCUAAAGUUAAUUAUGUgCCagaGC | 1326 | CCUAAAG | 1398 |
| GAUGCCA | | UAGAAAUAGCAAGUUAAAAUAAGGCUAGUC | | UUAAUUA | |
| GUUCCU | | CGUUAUCAACUUGAAAAAGUGGCACCGAGU | | UGUgCC | |
| | | CG | | | |
| GCUAGGG | 1255 | caccGUUAAUUAUGUgCCUGGUCCAagaGC | 1327 | UUAAUUA | 1399 |
| GAUGCCA | | UAGAAAUAGCAAGUUAAAAUAAGGCUAGUC | | UGUgCCU | |
| GUUCCU | | CGUUAUCAACUUGAAAAAGUGGCACCGAGU | | GGUCCA | |
| | | CG | | | |
| GCUAGGG | 1256 | caccGAUGUgCCUGGUCCAAGGAACagaGC | 1328 | AUGUgCC | 1400 |
| GAUGCCA | | UAGAAAUAGCAAGUUAAAAUAAGGCUAGUC | | UGGUCCA | |
| GUUCCU | | CGUUAUCAACUUGAAAAAGUGGCACCGAGU | | AGGAAC | |
| | | CG | | | |
| GCUAGGG | 1257 | caccGCCUUACUGCUGCCCAAAGAUagaGC | 1329 | CCUUACU | 1401 |
| GAUGCCA | | UAGAAAUAGCAAGUUAAAAUAAGGCUAGUC | | GCUGCCC | |
| GUUCCU | | CGUUAUCAACUUGAAAAAGUGGCACCGAGU | | AAAGAU | |
| | | CG | | | |
| GCUAGGG | 1258 | caccGAGAUUGGAAGAGAGUUGCUGagaGC | 1330 | AGAUUGG | 1402 |
| GAUGCCA | | UAGAAAUAGCAAGUUAAAAUAAGGCUAGUC | | AAGAGAG | |
| GUUCCU | | CGUUAUCAACUUGAAAAAGUGGCACCGAGU | | UUGCUG | |
| | | CG | | | |
| GCUAGGG | 1259 | caccGAAGAGAGUUGCUGAGGAUUCagaGC | 1331 | AAGAGAG | 1403 |
| GAUGCCA | | UAGAAAUAGCAAGUUAAAAUAAGGCUAGUC | | UUGCUGA | |
| GUUCCU | | CGUUAUCAACUUGAAAAAGUGGCACCGAGU | | GGAUUC | |
| | | CG | | | |
| UGGGCAG | 1260 | caccGCCUAAAGUUAAUUAUGUgCCagaGC | 1332 | CCUAAAG | 1404 |
| CAGUAAG | | UAGAAAUAGCAAGUUAAAAUAAGGCUAGUC | | UUAAUUA | |
| GGCUAG | | CGUUAUCAACUUGAAAAAGUGGCACCGAGU | | UGUgCC | |
| | | CG | | | |
| UGGGCAG | 1261 | caccGUUAAUUAUGUgCCUGGUCCAagaGC | 1333 | UUAAUUA | 1405 |
| CAGUAAG | | UAGAAAUAGCAAGUUAAAAUAAGGCUAGUC | | UGUgCCU | |
| GGCUAG | | CGUUAUCAACUUGAAAAAGUGGCACCGAGU | | GGUCCA | |
| | | CG | | | |
| UGGGCAG | 1262 | caccGAUGUgCCUGGUCCAAGGAACagaGC | 1334 | AUGUgCC | 1406 |
| CAGUAAG | | UAGAAAUAGCAAGUUAAAAUAAGGCUAGUC | | UGGUCCA | |
| GGCUAG | | CGUUAUCAACUUGAAAAAGUGGCACCGAGU | | AGGAAC | |
| | | CG | | | |
| UGGGCAG | 1263 | caccGCCUUACUGCUGCCCAAAGAUagaGC | 1335 | CCUUACU | 1407 |
| CAGUAAG | | UAGAAAUAGCAAGUUAAAAUAAGGCUAGUC | | GCUGCCC | |
| GGCUAG | | CGUUAUCAACUUGAAAAAGUGGCACCGAGU | | AAAGAU | |
| | | CG | | | |
| UGGGCAG | 1264 | caccGAGAUUGGAAGAGAGUUGCUGagaGC | 1336 | AGAUUGG | 1408 |
| CAGUAAG | | UAGAAAUAGCAAGUUAAAAUAAGGCUAGUC | | AAGAGAG | |
| GGCUAG | | CGUUAUCAACUUGAAAAAGUGGCACCGAGU | | UUGCUG | |
| | | CG | | | |
| UGGGCAG | 1265 | caccGAAGAGAGUUGCUGAGGAUUCagaGC | 1337 | AAGAGAG | 1409 |
| CAGUAAG | | UAGAAAUAGCAAGUUAAAAUAAGGCUAGUC | | UUGCUGA | |
| GGCUAG | | CGUUAUCAACUUGAAAAAGUGGCACCGAGU | | GGAUUC | |
| | | CG | | | |
| UUGGGCA | 1266 | caccGCCUAAAGUUAAUUAUGUgCCagaGC | 1338 | CCUAAAG | 1410 |
| GCAGUAA | | UAGAAAUAGCAAGUUAAAAUAAGGCUAGUC | | UUAAUUA | |
| GGGCUA | | CGUUAUCAACUUGAAAAAGUGGCACCGAGU | | UGUgCC | |
| | | CG | | | |
| UUGGGCA | 1267 | caccGUUAAUUAUGUgCCUGGUCCAagaGC | 1339 | UUAAUUA | 1411 |
| GCAGUAA | | UAGAAAUAGCAAGUUAAAAUAAGGCUAGUC | | UGUgCCU | |
| GGGCUA | | CGUUAUCAACUUGAAAAAGUGGCACCGAGU | | GGUCCA | |
| | | CG | | | |
| UUGGGCA | 1268 | caccGAUGUgCCUGGUCCAAGGAACagaGC | 1340 | AUGUgCC | 1412 |
| GCAGUAA | | UAGAAAUAGCAAGUUAAAAUAAGGCUAGUC | | UGGUCCA | |
| GGGCUA | | CGUUAUCAACUUGAAAAAGUGGCACCGAGU | | AGGAAC | |
| | | CG | | | |
| UUGGGCA | 1269 | caccGCCUUACUGCUGCCCAAAGAUagaGC | 1341 | CCUUACU | 1413 |
| GCAGUAA | | UAGAAAUAGCAAGUUAAAAUAAGGCUAGUC | | GCUGCCC | |
| GGGCUA | | CGUUAUCAACUUGAAAAAGUGGCACCGAGU | | AAAGAU | |
| | | CG | | | |
| UUGGGCA | 1270 | caccGAGAUUGGAAGAGAGUUGCUGagaGC | 1342 | AGAUUGG | 1414 |
| GCAGUAA | | UAGAAAUAGCAAGUUAAAAUAAGGCUAGUC | | AAGAGAG | |
| GGGCUA | | CGUUAUCAACUUGAAAAAGUGGCACCGAGU | | UUGCUG | |
| | | CG | | | |
| UUGGGCA | 1271 | caccGAAGAGAGUUGCUGAGGAUUCagaGC | 1343 | AAGAGAG | 1415 |
| GCAGUAA | | UAGAAAUAGCAAGUUAAAAUAAGGCUAGUC | | UUGCUGA | |
| GGGCUA | | CGUUAUCAACUUGAAAAAGUGGCACCGAGU | | GGAUUC | |
| | | CG | | | |
| CCUAAAG | 1272 | UAAUUCUAAAAGUAUGAUGUGUUUUAGAGC | 1344 | UAAUUCU | 1416 |
| UUAAUUA | | UAGAAAUAGCAAGUUAAAAUAAGGCUAGUC | | AAAAGUA | |
| UGUACC | | CGUUAUCAACUUGAAAAAGUGGCACCGAGU | | UGAUGU | |
| | | CGGUGCUUUU | | | |
| CCUAAAG | 1273 | ACUUUAGGUAUUUAUUCUGCGUUUUAGAGC | 1345 | ACUUUAG | 1417 |
| UUAAUUA | | UAGAAAUAGCAAGUUAAAAUAAGGCUAGUC | | GUAUUUA | |
| UGUACC | | CGUUAUCAACUUGAAAAAGUGGCACCGAGU | | UUCUGC | |
| | | CGGUGCUUUU | | | |
| CCUAAAG | 1274 | GCCAGGACAUAAUUAACUUUGUUUUAGAGC | 1346 | GCCAGGA | 1418 |
| UUAAUUA | | UAGAAAUAGCAAGUUAAAAUAAGGCUAGUC | | CAUAAUU | |
| UGUACC | | CGUUAUCAACUUGAAAAAGUGGCACCGAGU | | AACUUU | |
| | | CGGUGCUUUU | | | |
| CCUAAAG | 1275 | GGAUGCCAGUUCCUUGGACCGUUUUAGAGC | 1347 | GGAUGCC | 1419 |
| UUAAUUA | | UAGAAAUAGCAAGUUAAAAUAAGGCUAGUC | | AGUUCCU | |
| UGUACC | | CGUUAUCAACUUGAAAAAGUGGCACCGAGU | | UGGACC | |
| | | CGGUGCUUUU | | | |
| CCUAAAG | 1276 | GCUAGGGGAUGCCAGUUCCUGUUUUAGAGC | 1348 | GCUAGGG | 1420 |
| UUAAUUA | | UAGAAAUAGCAAGUUAAAAUAAGGCUAGUC | | GAUGCCA | |
| UGUACC | | CGUUAUCAACUUGAAAAAGUGGCACCGAGU | | GUUCCU | |
| | | CGGUGCUUUU | | | |
| CCUAAAG | 1277 | UGGGCAGCAGUAAGGGCUAGGUUUUAGAGC | 1349 | UGGGCAG | 1421 |
| UUAAUUA | | UAGAAAUAGCAAGUUAAAAUAAGGCUAGUC | | CAGUAAG | |
| UGUACC | | CGUUAUCAACUUGAAAAAGUGGCACCGAGU | | GGCUAG | |
| | | CGGUGCUUUU | | | |
| CCUAAAG | 1278 | UUGGGCAGCAGUAAGGGCUAGUUUUAGAGC | 1350 | UUGGGCA | 1422 |
| UUAAUUA | | UAGAAAUAGCAAGUUAAAAUAAGGCUAGUC | | GCAGUAA | |
| UGUACC | | CGUUAUCAACUUGAAAAAGUGGCACCGAGU | | GGGCUA | |
| | | CGGUGCUUUU | | | |
| CCUAAAG | 1279 | UUUGGGCAGCAGUAAGGGCUGUUUUAGAGC | 1351 | UUUGGGC | 1423 |
| UUAAUUA | | UAGAAAUAGCAAGUUAAAAUAAGGCUAGUC | | AGCAGUA | |
| UGUACC | | CGUUAUCAACUUGAAAAAGUGGCACCGAGU | | AGGGCU | |
| | | CGGUGCUUUU | | | |
| CCUAAAG | 1280 | CAAUCUUUGGGCAGCAGUAAGUUUUAGAGC | 1352 | CAAUCUU | 1424 |
| UUAAUUA | | UAGAAAUAGCAAGUUAAAAUAAGGCUAGUC | | UGGGCAG | |
| UGUACC | | CGUUAUCAACUUGAAAAAGUGGCACCGAGU | | CAGUAA | |
| | | CGGUGCUUUU | | | |
| CCUAAAG | 1281 | CCAAUCUUUGGGCAGCAGUAGUUUUAGAGC | 1353 | CCAAUCU | 1425 |
| UUAAUUA | | UAGAAAUAGCAAGUUAAAAUAAGGCUAGUC | | UUGGGCA | |
| UGUACC | | CGUUAUCAACUUGAAAAAGUGGCACCGAGU | | GCAGUA | |
| | | CGGUGCUUUU | | | |
| CCUAAAG | 1282 | GCAACUCUCUUCCAAUCUUUGUUUUAGAGC | 1354 | GCAACUC | 1426 |
| UUAAUUA | | UAGAAAUAGCAAGUUAAAAUAAGGCUAGUC | | UCUUCCA | |
| UGUACC | | CGUUAUCAACUUGAAAAAGUGGCACCGAGU | | AUCUUU | |
| | | CGGUGCUUUU | | | |
| CCUAAAG | 1283 | AGCAACUCUCUUCCAAUCUUGUUUUAGAGC | 1355 | AGCAACU | 1427 |
| UUAAUUA | | UAGAAAUAGCAAGUUAAAAUAAGGCUAGUC | | CUCUUCC | |
| UGUACC | | CGUUAUCAACUUGAAAAAGUGGCACCGAGU | | AAUCUU | |
| | | CGGUGCUUUU | | | |
| GGAUGCC | 1284 | CCUAAAGUUAAUUAUGUgCCGUUUUAGAGC | 1356 | CCUAAAG | 1428 |
| AGUUCCU | | UAGAAAUAGCAAGUUAAAAUAAGGCUAGUC | | UUAAUUA | |
| UGGACC | | CGUUAUCAACUUGAAAAAGUGGCACCGAGU | | UGUgCC | |
| | | CGGUGCUUUU | | | |
| GGAUGCC | 1285 | UUAAUUAUGUgCCUGGUCCAGUUUUAGAGC | 1357 | UUAAUUA | 1429 |
| AGUUCCU | | UAGAAAUAGCAAGUUAAAAUAAGGCUAGUC | | UGUgCCU | |
| UGGACC | | CGUUAUCAACUUGAAAAAGUGGCACCGAGU | | GGUCCA | |
| | | CGGUGCUUUU | | | |
| GGAUGCC | 1286 | AUGUgCCUGGUCCAAGGAACGUUUUAGAGC | 1358 | AUGUgCC | 1430 |
| AGUUCCU | | UAGAAAUAGCAAGUUAAAAUAAGGCUAGUC | | UGGUCCA | |
| UGGACC | | CGUUAUCAACUUGAAAAAGUGGCACCGAGU | | AGGAAC | |
| | | CGGUGCUUUU | | | |
| GGAUGCC | 1287 | CCUUACUGCUGCCCAAAGAUGUUUUAGAGC | 1359 | CCUUACU | 1431 |
| AGUUCCU | | UAGAAAUAGCAAGUUAAAAUAAGGCUAGUC | | GCUGCCC | |
| UGGACC | | CGUUAUCAACUUGAAAAAGUGGCACCGAGU | | AAAGAU | |
| | | CGGUGCUUUU | | | |
| GGAUGCC | 1288 | AGAUUGGAAGAGAGUUGCUGGUUUUAGAGC | 1360 | AGAUUGG | 1432 |
| AGUUCCU | | UAGAAAUAGCAAGUUAAAAUAAGGCUAGUC | | AAGAGAG | |
| UGGACC | | CGUUAUCAACUUGAAAAAGUGGCACCGAGU | | UUGCUG | |
| | | CGGUGCUUUU | | | |
| GGAUGCC | 1289 | AAGAGAGUUGCUGAGGAUUCGUUUUAGAGC | 1361 | AAGAGAG | 1433 |
| AGUUCCU | | UAGAAAUAGCAAGUUAAAAUAAGGCUAGUC | | UUGCUGA | |
| UGGACC | | CGUUAUCAACUUGAAAAAGUGGCACCGAGU | | GGAUUC | |
| | | CGGUGCUUUU | | | |
| GCUAGGG | 1290 | CCUAAAGUUAAUUAUGUgCCGUUUUAGAGC | 1362 | CCUAAAG | 1434 |
| GAUGCCA | | UAGAAAUAGCAAGUUAAAAUAAGGCUAGUC | | UUAAUUA | |
| GUUCCU | | CGUUAUCAACUUGAAAAAGUGGCACCGAGU | | UGUgCC | |
| | | CGGUGCUUUU | | | |
| GCUAGGG | 1291 | UUAAUUAUGUgCCUGGUCCAGUUUUAGAGC | 1363 | UUAAUUA | 1435 |
| GAUGCCA | | UAGAAAUAGCAAGUUAAAAUAAGGCUAGUC | | UGUgCCU | |
| GUUCCU | | CGUUAUCAACUUGAAAAAGUGGCACCGAGU | | GGUCCA | |
| | | CGGUGCUUUU | | | |
| GCUAGGG | 1292 | AUGUgCCUGGUCCAAGGAACGUUUUAGAGC | 1364 | AUGUgCC | 1436 |
| GAUGCCA | | UAGAAAUAGCAAGUUAAAAUAAGGCUAGUC | | UGGUCCA | |
| GUUCCU | | CGUUAUCAACUUGAAAAAGUGGCACCGAGU | | AGGAAC | |
| | | CGGUGCUUUU | | | |
| GCUAGGG | 1293 | CCUUACUGCUGCCCAAAGAUGUUUUAGAGC | 1365 | CCUUACU | 1437 |
| GAUGCCA | | UAGAAAUAGCAAGUUAAAAUAAGGCUAGUC | | GCUGCCC | |
| GUUCCU | | CGUUAUCAACUUGAAAAAGUGGCACCGAGU | | AAAGAU | |
| | | CGGUGCUUUU | | | |
| GCUAGGG | 1294 | AGAUUGGAAGAGAGUUGCUGGUUUUAGAGC | 1366 | AGAUUGG | 1438 |
| GAUGCCA | | UAGAAAUAGCAAGUUAAAAUAAGGCUAGUC | | AAGAGAG | |
| GUUCCU | | CGUUAUCAACUUGAAAAAGUGGCACCGAGU | | UUGCUG | |
| | | CGGUGCUUUU | | | |
| GCUAGGG | 1295 | AAGAGAGUUGCUGAGGAUUCGUUUUAGAGC | 1367 | AAGAGAG | 1439 |
| GAUGCCA | | UAGAAAUAGCAAGUUAAAAUAAGGCUAGUC | | UUGCUGA | |
| GUUCCU | | CGUUAUCAACUUGAAAAAGUGGCACCGAGU | | GGAUUC | |
| | | CGGUGCUUUU | | | |
| UGGGCAG | 1296 | CCUAAAGUUAAUUAUGUgCCGUUUUAGAGC | 1368 | CCUAAAG | 1440 |
| CAGUAAG | | UAGAAAUAGCAAGUUAAAAUAAGGCUAGUC | | UUAAUUA | |
| GGCUAG | | CGUUAUCAACUUGAAAAAGUGGCACCGAGU | | UGUgCC | |
| | | CGGUGCUUUU | | | |
| UGGGCAG | 1297 | UUAAUUAUGUgCCUGGUCCAGUUUUAGAGC | 1369 | UUAAUUA | 1441 |
| CAGUAAG | | UAGAAAUAGCAAGUUAAAAUAAGGCUAGUC | | UGUgCCU | |
| GGCUAG | | CGUUAUCAACUUGAAAAAGUGGCACCGAGU | | GGUCCA | |
| | | CGGUGCUUUU | | | |
| UGGGCAG | 1298 | AUGUgCCUGGUCCAAGGAACGUUUUAGAGC | 1370 | AUGUgCC | 1442 |
| CAGUAAG | | UAGAAAUAGCAAGUUAAAAUAAGGCUAGUC | | UGGUCCA | |
| GGCUAG | | CGUUAUCAACUUGAAAAAGUGGCACCGAGU | | AGGAAC | |
| | | CGGUGCUUUU | | | |
| UGGGCAG | 1299 | CCUUACUGCUGCCCAAAGAUGUUUUAGAGC | 1371 | CCUUACU | 1443 |
| CAGUAAG | | UAGAAAUAGCAAGUUAAAAUAAGGCUAGUC | | GCUGCCC | |
| GGCUAG | | CGUUAUCAACUUGAAAAAGUGGCACCGAGU | | AAAGAU | |
| | | CGGUGCUUUU | | | |
| UGGGCAG | 1300 | AGAUUGGAAGAGAGUUGCUGGUUUUAGAGC | 1372 | AGAUUGG | 1444 |
| CAGUAAG | | UAGAAAUAGCAAGUUAAAAUAAGGCUAGUC | | AAGAGAG | |
| GGCUAG | | CGUUAUCAACUUGAAAAAGUGGCACCGAGU | | UUGCUG | |
| | | CGGUGCUUUU | | | |
| UGGGCAG | 1301 | AAGAGAGUUGCUGAGGAUUCGUUUUAGAGC | 1373 | AAGAGAG | 1445 |
| CAGUAAG | | UAGAAAUAGCAAGUUAAAAUAAGGCUAGUC | | UUGCUGA | |
| GGCUAG | | CGUUAUCAACUUGAAAAAGUGGCACCGAGU | | GGAUUC | |
| | | CGGUGCUUUU | | | |
| UUGGGCA | 1302 | CCUAAAGUUAAUUAUGUgCCGUUUUAGAGC | 1374 | CCUAAAG | 1446 |
| GCAGUAA | | UAGAAAUAGCAAGUUAAAAUAAGGCUAGUC | | UUAAUUA | |
| GGGCUA | | CGUUAUCAACUUGAAAAAGUGGCACCGAGU | | UGUgCC | |
| | | CGGUGCUUUU | | | |
| UUGGGCA | 1303 | UUAAUUAUGUgCCUGGUCCAGUUUUAGAGC | 1375 | UUAAUUA | 1447 |
| GCAGUAA | | UAGAAAUAGCAAGUUAAAAUAAGGCUAGUC | | UGUgCCU | |
| GGGCUA | | CGUUAUCAACUUGAAAAAGUGGCACCGAGU | | GGUCCA | |
| | | CGGUGCUUUU | | | |
| UUGGGCA | 1304 | AUGUgCCUGGUCCAAGGAACGUUUUAGAGC | 1376 | AUGUgCC | 1448 |
| GCAGUAA | | UAGAAAUAGCAAGUUAAAAUAAGGCUAGUC | | UGGUCCA | |
| GGGCUA | | CGUUAUCAACUUGAAAAAGUGGCACCGAGU | | AGGAAC | |
| | | CGGUGCUUUU | | | |
| UUGGGCA | 1305 | CCUUACUGCUGCCCAAAGAUGUUUUAGAGC | 1377 | CCUUACU | 1449 |
| GCAGUAA | | UAGAAAUAGCAAGUUAAAAUAAGGCUAGUC | | GCUGCCC | |
| GGGCUA | | CGUUAUCAACUUGAAAAAGUGGCACCGAGU | | AAAGAU | |
| | | CGGUGCUUUU | | | |
| UUGGGCA | 1306 | AGAUUGGAAGAGAGUUGCUGGUUUUAGAGC | 1378 | AGAUUGG | 1450 |
| GCAGUAA | | UAGAAAUAGCAAGUUAAAAUAAGGCUAGUC | | AAGAGAG | |
| GGGCUA | | CGUUAUCAACUUGAAAAAGUGGCACCGAGU | | UUGCUG | |
| | | CGGUGCUUUU | | | |
| UUGGGCA | 1307 | AAGAGAGUUGCUGAGGAUUCGUUUUAGAGC | 1379 | AAGAGAG | 1451 |
| GCAGUAA | | UAGAAAUAGCAAGUUAAAAUAAGGCUAGUC | | UUGCUGA | |
| GGGCUA | | CGUUAUCAACUUGAAAAAGUGGCACCGAGU | | GGAUUC | |
| | | CGGUGCUUUU | | | |

### OTHER EMBODIMENTS

[0572] From the foregoing description, it will be apparent that variations and modifications may be made to the embodiments and aspects described herein to adopt it to various usages and conditions. Such embodiments are also within the scope of the following claims.

[0573] The recitation of a listing of elements in any definition of a variable herein includes definitions of that variable as any single element or combination (or subcombination) of listed elements. The recitation of an embodiment herein includes that embodiment as any single embodiment or in combination with any other embodiments or portions thereof.

[0574] The present disclosure may be related to one or more of International Patent Applications No. PCT/US22/75021, PCT/US20/13964, PCT/US20/52822, PCT/US20/18178, PCT/US21/52035, PCT/US22/81241, PCT/US23/67780, PCT/US23/68543, and/or PCT/US23/72911, and/or U.S. Provisional Patent Applications Nos. 63/592,339, 63/612,146, 63/618,520, and/or 63/621,953, the disclosures of which are incorporated herein by reference in their entirety for all purposes. All patents and publications mentioned in this specification are herein incorporated by reference to the same extent as if each independent patent and publication was specifically and individually indicated to be incorporated by reference.

The application's sequence listing, which the Patent Office published only in electronic form, follows.

SEQUENCE LISTING (1452 sequences)

SEQ ID NO: 1 - protein, 167 aa, Escherichia coli
  REGION 1..167: note = misc_feature - TadA*7.10 (ecTadA) polypeptide sequence
MSEVEFSHEYWMRHALTLAKRARDEREVPVGAVLVLNNRVIGEGWNRAIGLHDPTAHAEIMALRQGGLVMQNYRLIDATLYVTFEPCVMCAGAMIHSRIGRVVFGVRNAKTGAAGSLMDVLHYPGMNHRVEITEGILADECAALLCYFFRMPRQVFNAQKKAQSSTD

SEQ ID NO: 2 - DNA, 4092 bp, synthetic construct
  misc_feature 1..4092: note = BhCas12b GGSGGS-ABE8-Xten20at P153 polynucleotide sequence
  misc_feature 1..6: note = Kozak sequence
  misc_feature 7..57: note = Sequence encoding N-terminal nuclear localization signal
  misc_feature 58..513: note = Sequence encoding BhCas12b
  misc_feature 514..531: note = Sequence encoding a linker
  misc_feature 532..1029: note = Sequence encoding TadA*8
  misc_feature 1030..1089: note = Sequence encoding Xten20 linker
  misc_feature 1090..3954: note = Sequence encoding BhCas12b
  misc_feature 3955..4002: note = Sequence encoding C-terminal NLS
  misc_feature 4003..4008: note = Sequence encoding GS linker
  misc_feature 4009..4089: note = Sequence encoding 3x hemagglutinin (HA) tag
  source 1..4092: mol_type = other DNA
gccaccatggccccaaagaagaagcggaaggtcggtatccacggagtcccagcagccgccaccagatccttcatcctgaagatcgagcccaacgaggaagtgaagaaaggcctctggaaaacccacgaggtgctgaaccacggaatcgcctactacatgaatatcctgaagctgatccggcaagaggccatctacgagcaccacgagcaggaccccaagaatcccaagaaggtgtccaaggccgagatccaggccgagctgtgggatttcgtgctgaagatgcagaagtgcaacagcttcacacacgaggtggacaaggacgaggtgttcaacatcctgagagagctgtacgaggaactggtgcccagcagcgtggaaaagaagggcgaagccaaccagctgagcaacaagtttctgtaccctctggtggaccccaacagccagtctggaaagggaacagccagcagcggcagaaagcccagatggtacaacctgaagattgccggcgatcccggaggctctggaggaagctccgaagtcgagttttcccatgagtactggatgagacacgcattgactctcgcaaagagggctcgagatgaacgcgaggtgcccgtgggggcagtactcgtgctcaacaatcgcgtaatcggcgaaggttggaatagggcaatcggactccacgaccccactgcacatgcggaaatcatggcccttcgacagggagggcttgtgatgcagaattatcgactttatgatgcgacgctgtacgtcacgtttgaaccttgcgtaatgtgcgcgggagctatgattcactcccgcattggacgagttgtattcggtgttcgcaacgccaagacgggtgccgcaggttcactgatggacgtgctgcatcatccaggcatgaaccaccgggtagaaatcacagaaggcatattggcggacgaatgtgcggcgctgttgtgtcgtttttttcgcatgcccaggcgggtctttaacgcccagaaaaaagcacaatcctctactgacggctcttctggatctgaaacacctggcacaagcgagagcgccacccctgagagctctggctcctgggaagaagagaagaagaagtgggaagaagataagaaaaaggacccgctggccaagatcctgggcaagctggctgagtacggactgatccctctgttcatcccctacaccgacagcaacgagcccatcgtgaaagaaatcaagtggatggaaaagtcccggaaccagagcgtgcggcggctggataaggacatgttcattcaggccctggaacggttcctgagctgggagagctggaacctgaaagtgaaagaggaatacgagaaggtcgagaaagagtacaagaccctggaagagaggatcaaagaggacatccaggctctgaaggctctggaacagtatgagaaagagcggcaagaacagctgctgcgggacaccctgaacaccaacgagtaccggctgagcaagagaggccttagaggctggcgggaaatcatccagaaatggctgaaaatggacgagaacgagccctccgagaagtacctggaagtgttcaaggactaccagcggaagcaccctagagaggccggcgattacagcgtgtacgagttcctgtccaagaaagagaaccacttcatctggcggaatcaccctgagtacccctacctgtacgccaccttctgcgagatcgacaagaaaaagaaggacgccaagcagcaggccaccttcacactggccgatcctatcaatcaccctctgtgggtccgattcgaggaaagaagcggcagcaacctgaacaagtacagaatcctgaccgagcagctgcacaccgagaagctgaagaaaaagctgacagtgcagctggaccggctgatctaccctacagaatctggcggctgggaagagaagggcaaagtggacattgtgctgctgcccagccggcagttctacaaccagatcttcctggacatcgaggaaaagggcaagcacgccttcacctacaaggatgagagcatcaagttccctctgaagggcacactcggcggagccagagtgcagttcgacagagatcacctgagaagataccctcacaaggtggaaagcggcaacgtgggcagaatctacttcaacatgaccgtgaacatcgagcctacagagtccccagtgtccaagtctctgaagatccaccgggacgacttccccaaggtggtcaacttcaagcccaaagaactgaccgagtggatcaaggacagcaagggcaagaaactgaagtccggcatcgagtccctggaaatcggcctgagagtgatgagcatcgacctgggacagagacaggccgctgccgcctctattttcgaggtggtggatcagaagcccgacatcgaaggcaagctgtttttcccaatcaagggcaccgagctgtatgccgtgcacagagccagcttcaacatcaagctgcccggcgagacactggtcaagagcagagaagtgctgcggaaggccagagaggacaatctgaaactgatgaaccagaagctcaacttcctgcggaacgtgctgcacttccagcagttcgaggacatcaccgagagagagaagcgggtcaccaagtggatcagcagacaagagaacagcgacgtgcccctggtgtaccaggatgagctgatccagatccgcgagctgatgtacaagccttacaaggactgggtcgccttcctgaagcagctccacaagagactggaagtcgagatcggcaaagaagtgaagcactggcggaagtccctgagcgacggaagaaagggcctgtacggcatctccctgaagaacatcgacgagatcgatcggacccggaagttcctgctgagatggtccctgaggcctaccgaacctggcgaagtgcgtagactggaacccggccagagattcgccatcgaccagctgaatcacctgaacgccctgaaagaagatcggctgaagaagatggccaacaccatcatcatgcacgccctgggctactgctacgacgtgcggaagaagaaatggcaggctaagaaccccgcctgccagatcatcctgttcgaggatctgagcaactacaacccctacgaggaaaggtcccgcttcgagaacagcaagctcatgaagtggtccagacgcgagatccccagacaggttgcactgcagggcgagatctatggcctgcaagtgggagaagtgggcgctcagttcagcagcagattccacgccaagacaggcagccctggcatcagatgtagcgtcgtgaccaaagagaagctgcaggacaatcggttcttcaagaatctgcagagagagggcagactgaccctggacaaaatcgccgtgctgaaagagggcgatctgtacccagacaaaggcggcgagaagttcatcagcctgagcaaggatcggaagtgcgtgaccacacacgccgacatcaacgccgctcagaacctgcagaagcggttctggacaagaacccacggcttctacaaggtgtactgcaaggcctaccaggtggacggccagaccgtgtacatccctgagagcaaggaccagaagcagaagatcatcgaagagttcggcgagggctacttcattctgaaggacggggtgtacgaatgggtcaacgccggcaagctgaaaatcaagaagggcagctccaagcagagcagcagcgagctggtggatagcgacatcctgaaagacagcttcgacctggcctccgagctgaaaggcgaaaagctgatgctgtacagggaccccagcggcaatgtgttccccagcgacaaatggatggccgctggcgtgttcttcggaaagctggaacgcatcctgatcagcaagctgaccaaccagtactccatcagcaccatcgaggacgacagcagcaagcagtctatgaaaaggccggcggccacgaaaaaggccggccaggcaaaaaagaaaaagggatcctacccatacgatgttccagattacgcttatccctacgacgtgcctgattatgcatacccatatgatgtccccgactatgcctaa

SEQ ID NO: 3 - protein, 1361 aa, synthetic construct
  REGION 1..1361: note = BhCas12b GGSGGS-ABE8-Xten20at P153 polypeptide sequence
MAPKKKRKVGIHGVPAAATRSFILKIEPNEEVKKGLWKTHEVLNHGIAYYMNILKLIRQEAIYEHHEQDPKNPKKVSKAEIQAELWDFVLKMQKCNSFTHEVDKDEVFNILRELYEELVPSSVEKKGEANQLSNKFLYPLVDPNSQSGKGTASSGRKPRWYNLKIAGDPGGSGGSSEVEFSHEYWMRHALTLAKRARDEREVPVGAVLVLNNRVIGEGWNRAIGLHDPTAHAEIMALRQGGLVMQNYRLYDATLYVTFEPCVMCAGAMIHSRIGRVVFGVRNAKTGAAGSLMDVLHHPGMNHRVEITEGILADECAALLCRFFRMPRRVFNAQKKAQSSTDGSSGSETPGTSESATPESSGSWEEEKKKWEEDKKKDPLAKILGKLAEYGLIPLFIPYTDSNEPIVKEIKWMEKSRNQSVRRLDKDMFIQALERFLSWESWNLKVKEEYEKVEKEYKTLEERIKEDIQALKALEQYEKERQEQLLRDTLNTNEYRLSKRGLRGWREIIQKWLKMDENEPSEKYLEVFKDYQRKHPREAGDYSVYEFLSKKENHFIWRNHPEYPYLYATFCEIDKKKKDAKQQATFTLADPINHPLWVRFEERSGSNLNKYRILTEQLHTEKLKKKLTVQLDRLIYPTESGGWEEKGKVDIVLLPSRQFYNQIFLDIEEKGKHAFTYKDESIKFPLKGTLGGARVQFDRDHLRRYPHKVESGNVGRIYFNMTVNIEPTESPVSKSLKIHRDDFPKVVNFKPKELTEWIKDSKGKKLKSGIESLEIGLRVMSIDLGQRQAAAASIFEVVDQKPDIEGKLFFPIKGTELYAVHRASFNIKLPGETLVKSREVLRKAREDNLKLMNQKLNFLRNVLHFQQFEDITEREKRVTKWISRQENSDVPLVYQDELIQIRELMYKPYKDWVAFLKQLHKRLEVEIGKEVKHWRKSLSDGRKGLYGISLKNIDEIDRTRKFLLRWSLRPTEPGEVRRLEPGQRFAIDQLNHLNALKEDRLKKMANTIIMHALGYCYDVRKKKWQAKNPACQIILFEDLSNYNPYEERSRFENSKLMKWSRREIPRQVALQGEIYGLQVGEVGAQFSSRFHAKTGSPGIRCSVVTKEKLQDNRFFKNLQREGRLTLDKIAVLKEGDLYPDKGGEKFISLSKDRKCVTTHADINAAQNLQKRFWTRTHGFYKVYCKAYQVDGQTVYIPESKDQKQKIIEEFGEGYFILKDGVYEWVNAGKLKIKKGSSKQSSSELVDSDILKDSFDLASELKGEKLMLYRDPSGNVFPSDKWMAAGVFFGKLERILISKLTNQYSISTIEDDSSKQSMKRPAATKKAGQAKKKKGSYPYDVPDYAYPYDVPDYAYPYDVPDYA

SEQ ID NO: 4 - DNA, 4092 bp, synthetic construct
  misc_feature 1..4092: note = BhCas12b GGSGGS-ABE8-Xten20at K255 polynucleotide sequence
  misc_feature 1..6: note = Kozak sequence
  misc_feature 7..57: note = Sequence encoding N-terminal nuclear localization signal (NLS)
  misc_feature 58..822: note = Sequence encoding BhCas12b
  misc_feature 823..840: note = Sequence encoding a linker
  misc_feature 841..1338: note = Sequence encoding TadA*8
  misc_feature 1339..1398: note = Sequence encoding Xten20 linker
  misc_feature 1399..3954: note = Sequence encoding BhCas12b
  misc_feature 3955..4002: note = Sequence encoding C-terminal NLS
  misc_feature 4003..4008: note = Sequence encoding a GS linker
  misc_feature 4009..4089: note = Sequence encoding 3x hemagglutinin (HA) tag
  source 1..4092: mol_type = other DNA
gccaccatggccccaaagaagaagcggaaggtcggtatccacggagtcccagcagccgccaccagatccttcatcctgaagatcgagcccaacgaggaagtgaagaaaggcctctggaaaacccacgaggtgctgaaccacggaatcgcctactacatgaatatcctgaagctgatccggcaagaggccatctacgagcaccacgagcaggaccccaagaatcccaagaaggtgtccaaggccgagatccaggccgagctgtgggatttcgtgctgaagatgcagaagtgcaacagcttcacacacgaggtggacaaggacgaggtgttcaacatcctgagagagctgtacgaggaactggtgcccagcagcgtggaaaagaagggcgaagccaaccagctgagcaacaagtttctgtaccctctggtggaccccaacagccagtctggaaagggaacagccagcagcggcagaaagcccagatggtacaacctgaagattgccggcgatccctcctgggaagaagagaagaagaagtgggaagaagataagaaaaaggacccgctggccaagatcctgggcaagctggctgagtacggactgatccctctgttcatcccctacaccgacagcaacgagcccatcgtgaaagaaatcaagtggatggaaaagtcccggaaccagagcgtgcggcggctggataaggacatgttcattcaggccctggaacggttcctgagctgggagagctggaacctgaaagtgaaagaggaatacgagaaggtcgagaaagagtacaagaccctggaagagaggatcaaaggaggctctggaggaagctccgaagtcgagttttcccatgagtactggatgagacacgcattgactctcgcaaagagggctcgagatgaacgcgaggtgcccgtgggggcagtactcgtgctcaacaatcgcgtaatcggcgaaggttggaatagggcaatcggactccacgaccccactgcacatgcggaaatcatggcccttcgacagggagggcttgtgatgcagaattatcgactttatgatgcgacgctgtacgtcacgtttgaaccttgcgtaatgtgcgcgggagctatgattcactcccgcattggacgagttgtattcggtgttcgcaacgccaagacgggtgccgcaggttcactgatggacgtgctgcatcatccaggcatgaaccaccgggtagaaatcacagaaggcatattggcggacgaatgtgcggcgctgttgtgtcgtttttttcgcatgcccaggcgggtctttaacgcccagaaaaaagcacaatcctctactgacggctcttctggatctgaaacacctggcacaagcgagagcgccacccctgagagctctggcgaggacatccaggctctgaaggctctggaacagtatgagaaagagcggcaagaacagctgctgcgggacaccctgaacaccaacgagtaccggctgagcaagagaggccttagaggctggcgggaaatcatccagaaatggctgaaaatggacgagaacgagccctccgagaagtacctggaagtgttcaaggactaccagcggaagcaccctagagaggccggcgattacagcgtgtacgagttcctgtccaagaaagagaaccacttcatctggcggaatcaccctgagtacccctacctgtacgccaccttctgcgagatcgacaagaaaaagaaggacgccaagcagcaggccaccttcacactggccgatcctatcaatcaccctctgtgggtccgattcgaggaaagaagcggcagcaacctgaacaagtacagaatcctgaccgagcagctgcacaccgagaagctgaagaaaaagctgacagtgcagctggaccggctgatctaccctacagaatctggcggctgggaagagaagggcaaagtggacattgtgctgctgcccagccggcagttctacaaccagatcttcctggacatcgaggaaaagggcaagcacgccttcacctacaaggatgagagcatcaagttccctctgaagggcacactcggcggagccagagtgcagttcgacagagatcacctgagaagataccctcacaaggtggaaagcggcaacgtgggcagaatctacttcaacatgaccgtgaacatcgagcctacagagtccccagtgtccaagtctctgaagatccaccgggacgacttccccaaggtggtcaacttcaagcccaaagaactgaccgagtggatcaaggacagcaagggcaagaaactgaagtccggcatcgagtccctggaaatcggcctgagagtgatgagcatcgacctgggacagagacaggccgctgccgcctctattttcgaggtggtggatcagaagcccgacatcgaaggcaagctgtttttcccaatcaagggcaccgagctgtatgccgtgcacagagccagcttcaacatcaagctgcccggcgagacactggtcaagagcagagaagtgctgcggaaggccagagaggacaatctgaaactgatgaaccagaagctcaacttcctgcggaacgtgctgcacttccagcagttcgaggacatcaccgagagagagaagcgggtcaccaagtggatcagcagacaagagaacagcgacgtgcccctggtgtaccaggatgagctgatccagatccgcgagctgatgtacaagccttacaaggactgggtcgccttcctgaagcagctccacaagagactggaagtcgagatcggcaaagaagtgaagcactggcggaagtccctgagcgacggaagaaagggcctgtacggcatctccctgaagaacatcgacgagatcgatcggacccggaagttcctgctgagatggtccctgaggcctaccgaacctggcgaagtgcgtagactggaacccggccagagattcgccatcgaccagctgaatcacctgaacgccctgaaagaagatcggctgaagaagatggccaacaccatcatcatgcacgccctgggctactgctacgacgtgcggaagaagaaatggcaggctaagaaccccgcctgccagatcatcctgttcgaggatctgagcaactacaacccctacgaggaaaggtcccgcttcgagaacagcaagctcatgaagtggtccagacgcgagatccccagacaggttgcactgcagggcgagatctatggcctgcaagtgggagaagtgggcgctcagttcagcagcagattccacgccaagacaggcagccctggcatcagatgtagcgtcgtgaccaaagagaagctgcaggacaatcggttcttcaagaatctgcagagagagggcagactgaccctggacaaaatcgccgtgctgaaagagggcgatctgtacccagacaaaggcggcgagaagttcatcagcctgagcaaggatcggaagtgcgtgaccacacacgccgacatcaacgccgctcagaacctgcagaagcggttctggacaagaacccacggcttctacaaggtgtactgcaaggcctaccaggtggacggccagaccgtgtacatccctgagagcaaggaccagaagcagaagatcatcgaagagttcggcgagggctacttcattctgaaggacggggtgtacgaatgggtcaacgccggcaagctgaaaatcaagaagggcagctccaagcagagcagcagcgagctggtggatagcgacatcctgaaagacagcttcgacctggcctccgagctgaaaggcgaaaagctgatgctgtacagggaccccagcggcaatgtgttccccagcgacaaatggatggccgctggcgtgttcttcggaaagctggaacgcatcctgatcagcaagctgaccaaccagtactccatcagcaccatcgaggacgacagcagcaagcagtctatgaaaaggccggcggccacgaaaaaggccggccaggcaaaaaagaaaaagggatcctacccatacgatgttccagattacgcttatccctacgacgtgcctgattatgcatacccatatgatgtccccgactatgcctaa

SEQ ID NO: 5 - protein, 1361 aa, synthetic construct
  REGION 1..1361: note = BhCas12b GGSGGS-ABE8-Xten20at K255 polypeptide sequence
MAPKKKRKVGIHGVPAAATRSFILKIEPNEEVKKGLWKTHEVLNHGIAYYMNILKLIRQEAIYEHHEQDPKNPKKVSKAEIQAELWDFVLKMQKCNSFTHEVDKDEVFNILRELYEELVPSSVEKKGEANQLSNKFLYPLVDPNSQSGKGTASSGRKPRWYNLKIAGDPSWEEEKKKWEEDKKKDPLAKILGKLAEYGLIPLFIPYTDSNEPIVKEIKWMEKSRNQSVRRLDKDMFIQALERFLSWESWNLKVKEEYEKVEKEYKTLEERIKGGSGGSSEVEFSHEYWMRHALTLAKRARDEREVPVGAVLVLNNRVIGEGWNRAIGLHDPTAHAEIMALRQGGLVMQNYRLYDATLYVTFEPCVMCAGAMIHSRIGRVVFGVRNAKTGAAGSLMDVLHHPGMNHRVEITEGILADECAALLCRFFRMPRRVFNAQKKAQSSTDGSSGSETPGTSESATPESSGEDIQALKALEQYEKERQEQLLRDTLNTNEYRLSKRGLRGWREIIQKWLKMDENEPSEKYLEVFKDYQRKHPREAGDYSVYEFLSKKENHFIWRNHPEYPYLYATFCEIDKKKKDAKQQATFTLADPINHPLWVRFEERSGSNLNKYRILTEQLHTEKLKKKLTVQLDRLIYPTESGGWEEKGKVDIVLLPSRQFYNQIFLDIEEKGKHAFTYKDESIKFPLKGTLGGARVQFDRDHLRRYPHKVESGNVGRIYFNMTVNIEPTESPVSKSLKIHRDDFPKVVNFKPKELTEWIKDSKGKKLKSGIESLEIGLRVMSIDLGQRQAAAASIFEVVDQKPDIEGKLFFPIKGTELYAVHRASFNIKLPGETLVKSREVLRKAREDNLKLMNQKLNFLRNVLHFQQFEDITEREKRVTKWISRQENSDVPLVYQDELIQIRELMYKPYKDWVAFLKQLHKRLEVEIGKEVKHWRKSLSDGRKGLYGISLKNIDEIDRTRKFLLRWSLRPTEPGEVRRLEPGQRFAIDQLNHLNALKEDRLKKMANTIIMHALGYCYDVRKKKWQAKNPACQIILFEDLSNYNPYEERSRFENSKLMKWSRREIPRQVALQGEIYGLQVGEVGAQFSSRFHAKTGSPGIRCSVVTKEKLQDNRFFKNLQREGRLTLDKIAVLKEGDLYPDKGGEKFISLSKDRKCVTTHADINAAQNLQKRFWTRTHGFYKVYCKAYQVDGQTVYIPESKDQKQKIIEEFGEGYFILKDGVYEWVNAGKLKIKKGSSKQSSSELVDSDILKDSFDLASELKGEKLMLYRDPSGNVFPSDKWMAAGVFFGKLERILISKLTNQYSISTIEDDSSKQSMKRPAATKKAGQAKKKKGSYPYDVPDYAYPYDVPDYAYPYDVPDYA

SEQ ID NO: 6 - DNA, 4092 bp, synthetic construct
  misc_feature 1..4092: note = BhCas12b GGSGGS-ABE8-Xten20at D306 polynucleotide sequence
  misc_feature 1..6: note = Kozak sequence
  misc_feature 7..57: note = Sequence encoding N-terminal nuclear localization signal (NLS)
  misc_feature 58..975: note = Sequence encoding BhCas12b
  misc_feature 976..993: note = Sequence encoding a linker
  misc_feature 994..1491: note = Sequence encoding TadA*8
  misc_feature 1492..1551: note = Sequence encoding Xten20 linker
  misc_feature 1552..3954: note = Sequence encoding BhCas12b
  misc_feature 3955..4002: note = Sequence encoding C-terminal NLS
  misc_feature 4003..4008: note = Sequence encoding a GS linker
  misc_feature 4009..4089: note = Sequence encoding 3x hemagglutinin (HA) tag
  source 1..4092: mol_type = other DNA
gccaccatggccccaaagaagaagcggaaggtcggtatccacggagtcccagcagccgccaccagatccttcatcctgaagatcgagcccaacgaggaagtgaagaaaggcctctggaaaacccacgaggtgctgaaccacggaatcgcctactacatgaatatcctgaagctgatccggcaagaggccatctacgagcaccacgagcaggaccccaagaatcccaagaaggtgtccaaggccgagatccaggccgagctgtgggatttcgtgctgaagatgcagaagtgcaacagcttcacacacgaggtggacaaggacgaggtgttcaacatcctgagagagctgtacgaggaactggtgcccagcagcgtggaaaagaagggcgaagccaaccagctgagcaacaagtttctgtaccctctggtggaccccaacagccagtctggaaagggaacagccagcagcggcagaaagcccagatggtacaacctgaagattgccggcgatccctcctgggaagaagagaagaagaagtgggaagaagataagaaaaaggacccgctggccaagatcctgggcaagctggctgagtacggactgatccctctgttcatcccctacaccgacagcaacgagcccatcgtgaaagaaatcaagtggatggaaaagtcccggaaccagagcgtgcggcggctggataaggacatgttcattcaggccctggaacggttcctgagctgggagagctggaacctgaaagtgaaagaggaatacgagaaggtcgagaaagagtacaagaccctggaagagaggatcaaagaggacatccaggctctgaaggctctggaacagtatgagaaagagcggcaagaacagctgctgcgggacaccctgaacaccaacgagtaccggctgagcaagagaggccttagaggctggcgggaaatcatccagaaatggctgaaaatggacggaggctctggaggaagctccgaagtcgagttttcccatgagtactggatgagacacgcattgactctcgcaaagagggctcgagatgaacgcgaggtgcccgtgggggcagtactcgtgctcaacaatcgcgtaatcggcgaaggttggaatagggcaatcggactccacgaccccactgcacatgcggaaatcatggcccttcgacagggagggcttgtgatgcagaattatcgactttatgatgcgacgctgtacgtcacgtttgaaccttgcgtaatgtgcgcgggagctatgattcactcccgcattggacgagttgtattcggtgttcgcaacgccaagacgggtgccgcaggttcactgatggacgtgctgcatcatccaggcatgaaccaccgggtagaaatcacagaaggcatattggcggacgaatgtgcggcgctgttgtgtcgtttttttcgcatgcccaggcgggtctttaacgcccagaaaaaagcacaatcctctactgacggctcttctggatctgaaacacctggcacaagcgagagcgccacccctgagagctctggcgagaacgagccctccgagaagtacctggaagtgttcaaggactaccagcggaagcaccctagagaggccggcgattacagcgtgtacgagttcctgtccaagaaagagaaccacttcatctggcggaatcaccctgagtacccctacctgtacgccaccttctgcgagatcgacaagaaaaagaaggacgccaagcagcaggccaccttcacactggccgatcctatcaatcaccctctgtgggtccgattcgaggaaagaagcggcagcaacctgaacaagtacagaatcctgaccgagcagctgcacaccgagaagctgaagaaaaagctgacagtgcagctggaccggctgatctaccctacagaatctggcggctgggaagagaagggcaaagtggacattgtgctgctgcccagccggcagttctacaaccagatcttcctggacatcgaggaaaagggcaagcacgccttcacctacaaggatgagagcatcaagttccctctgaagggcacactcggcggagccagagtgcagttcgacagagatcacctgagaagataccctcacaaggtggaaagcggcaacgtgggcagaatctacttcaacatgaccgtgaacatcgagcctacagagtccccagtgtccaagtctctgaagatccaccgggacgacttccccaaggtggtcaacttcaagcccaaagaactgaccgagtggatcaaggacagcaagggcaagaaactgaagtccggcatcgagtccctggaaatcggcctgagagtgatgagcatcgacctgggacagagacaggccgctgccgcctctattttcgaggtggtggatcagaagcccgacatcgaaggcaagctgtttttcccaatcaagggcaccgagctgtatgccgtgcacagagccagcttcaacatcaagctgcccggcgagacactggtcaagagcagagaagtgctgcggaaggccagagaggacaatctgaaactgatgaaccagaagctcaacttcctgcggaacgtgctgcacttccagcagttcgaggacatcaccgagagagagaagcgggtcaccaagtggatcagcagacaagagaacagcgacgtgcccctggtgtaccaggatgagctgatccagatccgcgagctgatgtacaagccttacaaggactgggtcgccttcctgaagcagctccacaagagactggaagtcgagatcggcaaagaagtgaagcactggcggaagtccctgagcgacggaagaaagggcctgtacggcatctccctgaagaacatcgacgagatcgatcggacccggaagttcctgctgagatggtccctgaggcctaccgaacctggcgaagtgcgtagactggaacccggccagagattcgccatcgaccagctgaatcacctgaacgccctgaaagaagatcggctgaagaagatggccaacaccatcatcatgcacgccctgggctactgctacgacgtgcggaagaagaaatggcaggctaagaaccccgcctgccagatcatcctgttcgaggatctgagcaactacaacccctacgaggaaaggtcccgcttcgagaacagcaagctcatgaagtggtccagacgcgagatccccagacaggttgcactgcagggcgagatctatggcctgcaagtgggagaagtgggcgctcagttcagcagcagattccacgccaagacaggcagccctggcatcagatgtagcgtcgtgaccaaagagaagctgcaggacaatcggttcttcaagaatctgcagagagagggcagactgaccctggacaaaatcgccgtgctgaaagagggcgatctgtacccagacaaaggcggcgagaagttcatcagcctgagcaaggatcggaagtgcgtgaccacacacgccgacatcaacgccgctcagaacctgcagaagcggttctggacaagaacccacggcttctacaaggtgtactgcaaggcctaccaggtggacggccagaccgtgtacatccctgagagcaaggaccagaagcagaagatcatcgaagagttcggcgagggctacttcattctgaaggacggggtgtacgaatgggtcaacgccggcaagctgaaaatcaagaagggcagctccaagcagagcagcagcgagctggtggatagcgacatcctgaaagacagcttcgacctggcctccgagctgaaaggcgaaaagctgatgctgtacagggaccccagcggcaatgtgttccccagcgacaaatggatggccgctggcgtgttcttcggaaagctggaacgcatcctgatcagcaagctgaccaaccagtactccatcagcaccatcgaggacgacagcagcaagcagtctatgaaaaggccggcggccacgaaaaaggccggccaggcaaaaaagaaaaagggatcctacccatacgatgttccagattacgcttatccctacgacgtgcctgattatgcatacccatatgatgtccccgactatgcctaa

SEQ ID NO: 7 - protein, 1361 aa, synthetic construct
  REGION 1..1361: note = BhCas12b GGSGGS-ABE8-Xten20at D306 polypeptide sequence
MAPKKKRKVGIHGVPAAATRSFILKIEPNEEVKKGLWKTHEVLNHGIAYYMNILKLIRQEAIYEHHEQDPKNPKKVSKAEIQAELWDFVLKMQKCNSFTHEVDKDEVFNILRELYEELVPSSVEKKGEANQLSNKFLYPLVDPNSQSGKGTASSGRKPRWYNLKIAGDPSWEEEKKKWEEDKKKDPLAKILGKLAEYGLIPLFIPYTDSNEPIVKEIKWMEKSRNQSVRRLDKDMFIQALERFLSWESWNLKVKEEYEKVEKEYKTLEERIKEDIQALKALEQYEKERQEQLLRDTLNTNEYRLSKRGLRGWREIIQKWLKMDGGSGGSSEVEFSHEYWMRHALTLAKRARDEREVPVGAVLVLNNRVIGEGWNRAIGLHDPTAHAEIMALRQGGLVMQNYRLYDATLYVTFEPCVMCAGAMIHSRIGRVVFGVRNAKTGAAGSLMDVLHHPGMNHRVEITEGILADECAALLCRFFRMPRRVFNAQKKAQSSTDGSSGSETPGTSESATPESSGENEPSEKYLEVFKDYQRKHPREAGDYSVYEFLSKKENHFIWRNHPEYPYLYATFCEIDKKKKDAKQQATFTLADPINHPLWVRFEERSGSNLNKYRILTEQLHTEKLKKKLTVQLDRLIYPTESGGWEEKGKVDIVLLPSRQFYNQIFLDIEEKGKHAFTYKDESIKFPLKGTLGGARVQFDRDHLRRYPHKVESGNVGRIYFNMTVNIEPTESPVSKSLKIHRDDFPKVVNFKPKELTEWIKDSKGKKLKSGIESLEIGLRVMSIDLGQRQAAAASIFEVVDQKPDIEGKLFFPIKGTELYAVHRASFNIKLPGETLVKSREVLRKAREDNLKLMNQKLNFLRNVLHFQQFEDITEREKRVTKWISRQENSDVPLVYQDELIQIRELMYKPYKDWVAFLKQLHKRLEVEIGKEVKHWRKSLSDGRKGLYGISLKNIDEIDRTRKFLLRWSLRPTEPGEVRRLEPGQRFAIDQLNHLNALKEDRLKKMANTIIMHALGYCYDVRKKKWQAKNPACQIILFEDLSNYNPYEERSRFENSKLMKWSRREIPRQVALQGEIYGLQVGEVGAQFSSRFHAKTGSPGIRCSVVTKEKLQDNRFFKNLQREGRLTLDKIAVLKEGDLYPDKGGEKFISLSKDRKCVTTHADINAAQNLQKRFWTRTHGFYKVYCKAYQVDGQTVYIPESKDQKQKIIEEFGEGYFILKDGVYEWVNAGKLKIKKGSSKQSSSELVDSDILKDSFDLASELKGEKLMLYRDPSGNVFPSDKWMAAGVFFGKLERILISKLTNQYSISTIEDDSSKQSMKRPAATKKAGQAKKKKGSYPYDVPDYAYPYDVPDYAYPYDVPDYA

SEQ ID NO: 8 - DNA, 4092 bp, synthetic construct
  misc_feature 1..4092: note = BhCas12b GGSGGS-ABE8-Xten20at D980 polynucleotide sequence
  misc_feature 1..6: note = Kozak sequence
  misc_feature 7..57: note = Sequence encoding N-terminal nuclear localization signal (NLS)
  misc_feature 58..2997: note = Sequence encoding BhCas12b
  misc_feature 2998..3015: note = Sequence encoding a linker
  misc_feature 3016..3513: note = Sequence encoding TadA*8
  misc_feature 3514..3573: note = Sequence encoding Xten20 linker
  misc_feature 3574..3954: note = Sequence encoding BhCas12b
  misc_feature 3955..4002: note = Sequence encoding C-terminal NLS
  misc_feature 4003..4008: note = Sequence encoding a GS linker
  misc_feature 4009..4089: note = Sequence encoding 3x hemagglutinin (HA) tag
  source 1..4092: mol_type = other DNA
gccaccatggccccaaagaagaagcggaaggtcggtatccacggagtcccagcagccgccaccagatccttcatcctgaagatcgagcccaacgaggaagtgaagaaaggcctctggaaaacccacgaggtgctgaaccacggaatcgcctactacatgaatatcctgaagctgatccggcaagaggccatctacgagcaccacgagcaggaccccaagaatcccaagaaggtgtccaaggccgagatccaggccgagctgtgggatttcgtgctgaagatgcagaagtgcaacagcttcacacacgaggtggacaaggacgaggtgttcaacatcctgagagagctgtacgaggaactggtgcccagcagcgtggaaaagaagggcgaagccaaccagctgagcaacaagtttctgtaccctctggtggaccccaacagccagtctggaaagggaacagccagcagcggcagaaagcccagatggtacaacctgaagattgccggcgatccctcctgggaagaagagaagaagaagtgggaagaagataagaaaaaggacccgctggccaagatcctgggcaagctggctgagtacggactgatccctctgttcatcccctacaccgacagcaacgagcccatcgtgaaagaaatcaagtggatggaaaagtcccggaaccagagcgtgcggcggctggataaggacatgttcattcaggccctggaacggttcctgagctgggagagctggaacctgaaagtgaaagaggaatacgagaaggtcgagaaagagtacaagaccctggaagagaggatcaaagaggacatccaggctctgaaggctctggaacagtatgagaaagagcggcaagaacagctgctgcgggacaccctgaacaccaacgagtaccggctgagcaagagaggccttagaggctggcgggaaatcatccagaaatggctgaaaatggacgagaacgagccctccgagaagtacctggaagtgttcaaggactaccagcggaagcaccctagagaggccggcgattacagcgtgtacgagttcctgtccaagaaagagaaccacttcatctggcggaatcaccctgagtacccctacctgtacgccaccttctgcgagatcgacaagaaaaagaaggacgccaagcagcaggccaccttcacactggccgatcctatcaatcaccctctgtgggtccgattcgaggaaagaagcggcagcaacctgaacaagtacagaatcctgaccgagcagctgcacaccgagaagctgaagaaaaagctgacagtgcagctggaccggctgatctaccctacagaatctggcggctgggaagagaagggcaaagtggacattgtgctgctgcccagccggcagttctacaaccagatcttcctggacatcgaggaaaagggcaagcacgccttcacctacaaggatgagagcatcaagttccctctgaagggcacactcggcggagccagagtgcagttcgacagagatcacctgagaagataccctcacaaggtggaaagcggcaacgtgggcagaatctacttcaacatgaccgtgaacatcgagcctacagagtccccagtgtccaagtctctgaagatccaccgggacgacttccccaaggtggtcaacttcaagcccaaagaactgaccgagtggatcaaggacagcaagggcaagaaactgaagtccggcatcgagtccctggaaatcggcctgagagtgatgagcatcgacctgggacagagacaggccgctgccgcctctattttcgaggtggtggatcagaagcccgacatcgaaggcaagctgtttttcccaatcaagggcaccgagctgtatgccgtgcacagagccagcttcaacatcaagctgcccggcgagacactggtcaagagcagagaagtgctgcggaaggccagagaggacaatctgaaactgatgaaccagaagctcaacttcctgcggaacgtgctgcacttccagcagttcgaggacatcaccgagagagagaagcgggtcaccaagtggatcagcagacaagagaacagcgacgtgcccctggtgtaccaggatgagctgatccagatccgcgagctgatgtacaagccttacaaggactgggtcgccttcctgaagcagctccacaagagactggaagtcgagatcggcaaagaagtgaagcactggcggaagtccctgagcgacggaagaaagggcctgtacggcatctccctgaagaacatcgacgagatcgatcggacccggaagttcctgctgagatggtccctgaggcctaccgaacctggcgaagtgcgtagactggaacccggccagagattcgccatcgaccagctgaatcacctgaacgccctgaaagaagatcggctgaagaagatggccaacaccatcatcatgcacgccctgggctactgctacgacgtgcggaagaagaaatggcaggctaagaaccccgcctgccagatcatcctgttcgaggatctgagcaactacaacccctacgaggaaaggtcccgcttcgagaacagcaagctcatgaagtggtccagacgcgagatccccagacaggttgcactgcagggcgagatctatggcctgcaagtgggagaagtgggcgctcagttcagcagcagattccacgccaagacaggcagccctggcatcagatgtagcgtcgtgaccaaagagaagctgcaggacaatcggttcttcaagaatctgcagagagagggcagactgaccctggacaaaatcgccgtgctgaaagagggcgatctgtacccagacaaaggcggcgagaagttcatcagcctgagcaaggatcggaagtgcgtgaccacacacgccgacatcaacgccgctcagaacctgcagaagcggttctggacaagaacccacggcttctacaaggtgtactgcaaggcctaccaggtggacggaggctctggaggaagctccgaagtcgagttttcccatgagtactggatgagacacgcattgactctcgcaaagagggctcgagatgaacgcgaggtgcccgtgggggcagtactcgtgctcaacaatcgcgtaatcggcgaaggttggaatagggcaatcggactccacgaccccactgcacatgcggaaatcatggcccttcgacagggagggcttgtgatgcagaattatcgactttatgatgcgacgctgtacgtcacgtttgaaccttgcgtaatgtgcgcgggagctatgattcactcccgcattggacgagttgtattcggtgttcgcaacgccaagacgggtgccgcaggttcactgatggacgtgctgcatcatccaggcatgaaccaccgggtagaaatcacagaaggcatattggcggacgaatgtgcggcgctgttgtgtcgtttttttcgcatgcccaggcgggtctttaacgcccagaaaaaagcacaatcctctactgacggctcttctggatctgaaacacctggcacaagcgagagcgccacccctgagagctctggcggccagaccgtgtacatccctgagagcaaggaccagaagcagaagatcatcgaagagttcggcgagggctacttcattctgaaggacggggtgtacgaatgggtcaacgccggcaagctgaaaatcaagaagggcagctccaagcagagcagcagcgagctggtggatagcgacatcctgaaagacagcttcgacctggcctccgagctgaaaggcgaaaagctgatgctgtacagggaccccagcggcaatgtgttccccagcgacaaatggatggccgctggcgtgttcttcggaaagctggaacgcatcctgatcagcaagctgaccaaccagtactccatcagcaccatcgaggacgacagcagcaagcagtctatgaaaaggccggcggccacgaaaaaggccggccaggcaaaaaagaaaaagggatcctacccatacgatgttccagattacgcttatccctacgacgtgcctgattatgcatacccatatgatgtccccgactatgcctaa

SEQ ID NO: 9 - protein, 1361 aa, synthetic construct
  REGION 1..1361: note = BhCas12b GGSGGS-ABE8-Xten20at D980 polypeptide sequence
MAPKKKRKVGIHGVPAAATRSFILKIEPNEEVKKGLWKTHEVLNHGIAYYMNILKLIRQEAIYEHHEQDPKNPKKVSKAEIQAELWDFVLKMQKCNSFTHEVDKDEVFNILRELYEELVPSSVEKKGEANQLSNKFLYPLVDPNSQSGKGTASSGRKPRWYNLKIAGDPSWEEEKKKWEEDKKKDPLAKILGKLAEYGLIPLFIPYTDSNEPIVKEIKWMEKSRNQSVRRLDKDMFIQALERFLSWESWNLKVKEEYEKVEKEYKTLEERIKEDIQALKALEQYEKERQEQLLRDTLNTNEYRLSKRGLRGWREIIQKWLKMDENEPSEKYLEVFKDYQRKHPREAGDYSVYEFLSKKENHFIWRNHPEYPYLYATFCEIDKKKKDAKQQATFTLADPINHPLWVRFEERSGSNLNKYRILTEQLHTEKLKKKLTVQLDRLIYPTESGGWEEKGKVDIVLLPSRQFYNQIFLDIEEKGKHAFTYKDESIKFPLKGTLGGARVQFDRDHLRRYPHKVESGNVGRIYFNMTVNIEPTESPVSKSLKIHRDDFPKVVNFKPKELTEWIKDSKGKKLKSGIESLEIGLRVMSIDLGQRQAAAASIFEVVDQKPDIEGKLFFPIKGTELYAVHRASFNIKLPGETLVKSREVLRKAREDNLKLMNQKLNFLRNVLHFQQFEDITEREKRVTKWISRQENSDVPLVYQDELIQIRELMYKPYKDWVAFLKQLHKRLEVEIGKEVKHWRKSLSDGRKGLYGISLKNIDEIDRTRKFLLRWSLRPTEPGEVRRLEPGQRFAIDQLNHLNALKEDRLKKMANTIIMHALGYCYDVRKKKWQAKNPACQIILFEDLSNYNPYEERSRFENSKLMKWSRREIPRQVALQGEIYGLQVGEVGAQFSSRFHAKTGSPGIRCSVVTKEKLQDNRFFKNLQREGRLTLDKIAVLKEGDLYPDKGGEKFISLSKDRKCVTTHADINAAQNLQKRFWTRTHGFYKVYCKAYQVDGGSGGSSEVEFSHEYWMRHALTLAKRARDEREVPVGAVLVLNNRVIGEGWNRAIGLHDPTAHAEIMALRQGGLVMQNYRLYDATLYVTFEPCVMCAGAMIHSRIGRVVFGVRNAKTGAAGSLMDVLHHPGMNHRVEITEGILADECAALLCRFFRMPRRVFNAQKKAQSSTDGSSGSETPGTSESATPESSGGQTVYIPESKDQKQKIIEEFGEGYFILKDGVYEWVNAGKLKIKKGSSKQSSSELVDSDILKDSFDLASELKGEKLMLYRDPSGNVFPSDKWMAAGVFFGKLERILISKLTNQYSISTIEDDSSKQSMKRPAATKKAGQAKKKKGSYPYDVPDYAYPYDVPDYAYPYDVPDYA

SEQ ID NO: 10 - DNA, 4092 bp, synthetic construct
  misc_feature 1..4092: note = BhCas12b GGSGGS-ABE8-Xten20at K1019 polynucleotide sequence
  misc_feature 1..6: note = Kozak sequence
  misc_feature 7..57: note = Sequence encoding N-terminal nuclear localization signal (NLS)
  misc_feature 58..3114: note = Sequence encoding BhCas12b
  misc_feature 3115..3132: note = Sequence encoding a linker
  misc_feature 3133..3630: note = Sequence encoding TadA*8
  misc_feature 3631..3690: note = Sequence encoding Xten20 linker
  misc_feature 3691..3954: note = Sequence encoding BhCas12b
  misc_feature 3955..4002: note = Sequence encoding C-terminal NLS
  misc_feature 4003..4008: note = Sequence encoding GS linker
  misc_feature 4009..4089: note = Sequence encoding 3x hemagglutinin (HA) tag
  source 1..4092: mol_type = other DNA
gccaccatggccccaaagaagaagcggaaggtcggtatccacggagtcccagcagccgccaccagatccttcatcctgaagatcgagcccaacgaggaagtgaagaaaggcctctggaaaacccacgaggtgctgaaccacggaatcgcctactacatgaatatcctgaagctgatccggcaagaggccatctacgagcaccacgagcaggaccccaagaatcccaagaaggtgtccaaggccgagatccaggccgagctgtgggatttcgtgctgaagatgcagaagtgcaacagcttcacacacgaggtggacaaggacgaggtgttcaacatcctgagagagctgtacgaggaactggtgcccagcagcgtggaaaagaagggcgaagccaaccagctgagcaacaagtttctgtaccctctggtggaccccaacagccagtctggaaagggaacagccagcagcggcagaaagcccagatggtacaacctgaagattgccggcgatccctcctgggaagaagagaagaagaagtgggaagaagataagaaaaaggacccgctggccaagatcctgggcaagctggctgagtacggactgatccctctgttcatcccctacaccgacagcaacgagcccatcgtgaaagaaatcaagtggatggaaaagtcccggaaccagagcgtgcggcggctggataaggacatgttcattcaggccctggaacggttcctgagctgggagagctggaacctgaaagtgaaagaggaatacgagaaggtcgagaaagagtacaagaccctggaagagaggatcaaagaggacatccaggctctgaaggctctggaacagtatgagaaagagcggcaagaacagctgctgcgggacaccctgaacaccaacgagtaccggctgagcaagagaggccttagaggctggcgggaaatcatccagaaatggctgaaaatggacgagaacgagccctccgagaagtacctggaagtgttcaaggactaccagcggaagcaccctagagaggccggcgattacagcgtgtacgagttcctgtccaagaaagagaaccacttcatctggcggaatcaccctgagtacccctacctgtacgccaccttctgcgagatcgacaagaaaaagaaggacgccaagcagcaggccaccttcacactggccgatcctatcaatcaccctctgtgggtccgattcgaggaaagaagcggcagcaacctgaacaagtacagaatcctgaccgagcagctgcacaccgagaagctgaagaaaaagctgacagtgcagctggaccggctgatctaccctacagaatctggcggctgggaagagaagggcaaagtggacattgtgctgctgcccagccggcagttctacaaccagatcttcctggacatcgaggaaaagggcaagcacgccttcacctacaaggatgagagcatcaagttccctctgaagggcacactcggcggagccagagtgcagttcgacagagatcacctgagaagataccctcacaaggtggaaagcggcaacgtgggcagaatctacttcaacatgaccgtgaacatcgagcctacagagtccccagtgtccaagtctctgaagatccaccgggacgacttccccaaggtggtcaacttcaagcccaaagaactgaccgagtggatcaaggacagcaagggcaagaaactgaagtccggcatcgagtccctggaaatcggcctgagagtgatgagcatcgacctgggacagagacaggccgctgccgcctctattttcgaggtggtggatcagaagcccgacatcgaaggcaagctgtttttcccaatcaagggcaccgagctgtatgccgtgcacagagccagcttcaacatcaagctgcccggcgagacactggtcaagagcagagaagtgctgcggaaggccagagaggacaatctgaaactgatgaaccagaagctcaacttcctgcggaacgtgctgcacttccagcagttcgaggacatcaccgagagagagaagcgggtcaccaagtggatcagcagacaagagaacagcgacgtgcccctggtgtaccaggatgagctgatccagatccgcgagctgatgtacaagccttacaaggactgggtcgccttcctgaagcagctccacaagagactggaagtcgagatcggcaaagaagtgaagcactggcggaagtccctgagcgacggaagaaagggcctgtacggcatctccctgaagaacatcgacgagatcgatcggacccggaagttcctgctgagatggtccctgaggcctaccgaacctggcgaagtgcgtagactggaacccggccagagattcgccatcgaccagctgaatcacctgaacgccctgaaagaagatcggctgaagaagatggccaacaccatcatcatgcacgccctgggctactgctacgacgtgcggaagaagaaatggcaggctaagaaccccgcctgccagatcatcctgttcgaggatctgagcaactacaacccctacgaggaaaggtcccgcttcgagaacagcaagctcatgaagtggtccagacgcgagatccccagacaggttgcactgcagggcgagatctatggcctgcaagtgggagaagtgggcgctcagttcagcagcagattccacgccaagacaggcagccctggcatcagatgtagcgtcgtgaccaaagagaagctgcaggacaatcggttcttcaagaatctgcagagagagggcagactgaccctggacaaaatcgccgtgctgaaagagggcgatctgtacccagacaaaggcggcgagaagttcatcagcctgagcaaggatcggaagtgcgtgaccacacacgccgacatcaacgccgctcagaacctgcagaagcggttctggacaagaacccacggcttctacaaggtgtactgcaaggcctaccaggtggacggccagaccgtgtacatccctgagagcaaggaccagaagcagaagatcatcgaagagttcggcgagggctacttcattctgaaggacggggtgtacgaatgggtcaacgccggcaagggaggctctggaggaagctccgaagtcgagttttcccatgagtactggatgagacacgcattgactctcgcaaagagggctcgagatgaacgcgaggtgcccgtgggggcagtactcgtgctcaacaatcgcgtaatcggcgaaggttggaatagggcaatcggactccacgaccccactgcacatgcggaaatcatggcccttcgacagggagggcttgtgatgcagaattatcgactttatgatgcgacgctgtacgtcacgtttgaaccttgcgtaatgtgcgcgggagctatgattcactcccgcattggacgagttgtattcggtgttcgcaacgccaagacgggtgccgcaggttcactgatggacgtgctgcatcatccaggcatgaaccaccgggtagaaatcacagaaggcatattggcggacgaatgtgcggcgctgttgtgtcgtttttttcgcatgcccaggcgggtctttaacgcccagaaaaaagcacaatcctctactgacggctcttctggatctgaaacacctggcacaagcgagagcgccacccctgagagctctggcctgaaaatcaagaagggcagctccaagcagagcagcagcgagctggtggatagcgacatcctgaaagacagcttcgacctggcctccgagctgaaaggcgaaaagctgatgctgtacagggaccccagcggcaatgtgttccccagcgacaaatggatggccgctggcgtgttcttcggaaagctggaacgcatcctgatcagcaagctgaccaaccagtactccatcagcaccatcgaggacgacagcagcaagcagtctatgaaaaggccggcggccacgaaaaaggccggccaggcaaaaaagaaaaagggatcctacccatacgatgttccagattacgcttatccctacgacgtgcctgattatgcatacccatatgatgtccccgactatgcctaa

SEQ ID NO: 11 - protein, 1361 aa, synthetic construct
  REGION 1..1361: note = BhCas12b GGSGGS-ABE8-Xten20at K1019 polypeptide sequence
MAPKKKRKVGIHGVPAAATRSFILKIEPNEEVKKGLWKTHEVLNHGIAYYMNILKLIRQEAIYEHHEQDPKNPKKVSKAEIQAELWDFVLKMQKCNSFTHEVDKDEVFNILRELYEELVPSSVEKKGEANQLSNKFLYPLVDPNSQSGKGTASSGRKPRWYNLKIAGDPSWEEEKKKWEEDKKKDPLAKILGKLAEYGLIPLFIPYTDSNEPIVKEIKWMEKSRNQSVRRLDKDMFIQALERFLSWESWNLKVKEEYEKVEKEYKTLEERIKEDIQALKALEQYEKERQEQLLRDTLNTNEYRLSKRGLRGWREIIQKWLKMDENEPSEKYLEVFKDYQRKHPREAGDYSVYEFLSKKENHFIWRNHPEYPYLYATFCEIDKKKKDAKQQATFTLADPINHPLWVRFEERSGSNLNKYRILTEQLHTEKLKKKLTVQLDRLIYPTESGGWEEKGKVDIVLLPSRQFYNQIFLDIEEKGKHAFTYKDESIKFPLKGTLGGARVQFDRDHLRRYPHKVESGNVGRIYFNMTVNIEPTESPVSKSLKIHRDDFPKVVNFKPKELTEWIKDSKGKKLKSGIESLEIGLRVMSIDLGQRQAAAASIFEVVDQKPDIEGKLFFPIKGTELYAVHRASFNIKLPGETLVKSREVLRKAREDNLKLMNQKLNFLRNVLHFQQFEDITEREKRVTKWISRQENSDVPLVYQDELIQIRELMYKPYKDWVAFLKQLHKRLEVEIGKEVKHWRKSLSDGRKGLYGISLKNIDEIDRTRKFLLRWSLRPTEPGEVRRLEPGQRFAIDQLNHLNALKEDRLKKMANTIIMHALGYCYDVRKKKWQAKNPACQIILFEDLSNYNPYEERSRFENSKLMKWSRREIPRQVALQGEIYGLQVGEVGAQFSSRFHAKTGSPGIRCSVVTKEKLQDNRFFKNLQREGRLTLDKIAVLKEGDLYPDKGGEKFISLSKDRKCVTTHADINAAQNLQKRFWTRTHGFYKVYCKAYQVDGQTVYIPESKDQKQKIIEEFGEGYFILKDGVYEWVNAGKGGSGGSSEVEFSHEYWMRHALTLAKRARDEREVPVGAVLVLNNRVIGEGWNRAIGLHDPTAHAEIMALRQGGLVMQNYRLYDATLYVTFEPCVMCAGAMIHSRIGRVVFGVRNAKTGAAGSLMDVLHHPGMNHRVEITEGILADECAALLCRFFRMPRRVFNAQKKAQSSTDGSSGSETPGTSESATPESSGLKIKKGSSKQSSSELVDSDILKDSFDLASELKGEKLMLYRDPSGNVFPSDKWMAAGVFFGKLERILISKLTNQYSISTIEDDSSKQSMKRPAATKKAGQAKKKKGSYPYDVPDYAYPYDVPDYAYPYDVPDYA

SEQ ID NO: 12 - protein, 208 aa, Petromyzon marinus
  REGION 1..208: note = MISC_FEATURE - tr|A5H718|A5H718_PETMA Cytosine deaminase OS=Petromyzon marinusOX=7757 PE=2 SV=1 amino acid sequence; PmCDA1 polypeptide sequence
MTDAEYVRIHEKLDIYTFKKQFFNNKKSVSHRCYVLFELKRRGERRACFWGYAVNKPQSGTERGIHAEIFSIRKVEEYLRDNPGQFTINWYSSWSPCADCAEKILEWYNQELRGNGHTLKIWACKLYYEKNARNQIGLWNLRDNGVGLNVMVSEHYQCCRKIFIQSSHNQLNENRWLEKTLKRAEKRRSELSIMIQVKILHTTKSPAV

SEQ ID NO: 13 - DNA, 766 bp, Petromyzon marinus
  misc_feature 1..766: note = EF094822.1 Petromyzon marinus isolate PmCDA.21 cytosine deaminase mRNA, complete cds; PmCDA1 polynucleotide sequence
  source 1..766: mol_type = genomic DNA
tgacacgacacagccgtgtatatgaggaagggtagctggatggggggggggggaatacgttcagagaggacattagcgagcgtcttgttggtggccttgagtctagacacctgcagacatgaccgacgctgagtacgtgagaatccatgagaagttggacatctacacgtttaagaaacagtttttcaacaacaaaaaatccgtgtcgcatagatgctacgttctctttgaattaaaacgacggggtgaacgtagagcgtgtttttggggctatgctgtgaataaaccacagagcgggacagaacgtggaattcacgccgaaatctttagcattagaaaagtcgaagaatacctgcgcgacaaccccggacaattcacgataaattggtactcatcctggagtccttgtgcagattgcgctgaaaagatcttagaatggtataaccaggagctgcgggggaacggccacactttgaaaatctgggcttgcaaactctattacgagaaaaatgcgaggaatcaaattgggctgtggaacctcagagataacggggttgggttgaatgtaatggtaagtgaacactaccaatgttgcaggaaaatattcatccaatcgtcgcacaatcaattgaatgagaatagatggcttgagaagactttgaagcgagctgaaaaacgacggagcgagttgtccattatgattcaggtaaaaatactccacaccactaagagtcctgctgtttaagaggctatgcggatggttttc

SEQ ID NO: 14 - protein, 145 aa, Homo sapiens
  REGION 1..145: note = MISC_FEATURE - tr|Q6QJ80|Q6QJ80_HUMAN Activation-induced cytidine deaminase OS=Homo sapiens; OX = 9606 GN=AICDA PE=2 SV=1; AID polypeptide sequence
MDSLLMNRRKFLYQFKNVRWAKGRRETYLCYVVKRRDSATSFSLDFGYLRNKNGCHVELLFLRYISDWDLDPGRCYRVTWFTSWSPCYDCARHVADFLRGNPNLSLRIFTARLYFCEDRKAEPEGLRRLHRAGVQIAIMTFKAPV

SEQ ID NO: 15 - DNA, 10681 bp, Homo sapiens
  misc_feature 1..10681: note = NG_011588.1:5001-15681 Homo sapiens activation induced cytidine deaminase (AICDA), RefSeqGene (LRG_17) on chromosome 12; nucleic acid sequence of the CDS of human AID; polynucleotide sequence
  source 1..10681: mol_type = genomic DNA
agagaaccatcattaattgaagtgagatttttctggcctgagacttgcagggaggcaagaagacactctggacaccactatggacaggtaaagaggcagtcttctcgtgggtgattgcactggccttcctctcagagcaaatctgagtaatgagactggtagctatccctttctctcatgtaactgtctgactgataagatcagcttgatcaatatgcatatatattttttgatctgtctccttttcttctattcagatcttatacgctgtcagcccaattctttctgtttcagacttctcttgatttccctctttttcatgtggcaaaagaagtagtgcgtacaatgtactgattcgtcctgagatttgtaccatggttgaaactaatttatggtaataatattaacatagcaaatctttagagactcaaatcatgaaaaggtaatagcagtactgtactaaaaacggtagtgctaattttcgtaataattttgtaaatattcaacagtaaaacaacttgaagacacactttcctagggaggcgttactgaaataatttagctatagtaagaaaatttgtaattttagaaatgccaagcattctaaattaattgcttgaaagtcactatgattgtgtccattataaggagacaaattcattcaagcaagttatttaatgttaaaggcccaattgttaggcagttaatggcacttttactattaactaatctttccatttgttcagacgtagcttaacttacctcttaggtgtgaatttggttaaggtcctcataatgtctttatgtgcagtttttgataggttattgtcatagaacttattctattcctacatttatgattactatggatgtatgagaataacacctaatccttatactttacctcaatttaactcctttataaagaacttacattacagaataaagattttttaaaaatatatttttttgtagagacagggtcttagcccagccgaggctggtctctaagtcctggcccaagcgatcctcctgcctgggcctcctaaagtgctggaattatagacatgagccatcacatccaatatacagaataaagatttttaatggaggatttaatgttcttcagaaaattttcttgaggtcagacaatgtcaaatgtctcctcagtttacactgagattttgaaaacaagtctgagctataggtccttgtgaagggtccattggaaatacttgttcaaagtaaaatggaaagcaaaggtaaaatcagcagttgaaattcagagaaagacagaaaaggagaaaagatgaaattcaacaggacagaagggaaatatattatcattaaggaggacagtatctgtagagctcattagtgatggcaaaatgacttggtcaggattatttttaacccgcttgtttctggtttgcacggctggggatgcagctagggttctgcctcagggagcacagctgtccagagcagctgtcagcctgcaagcctgaaacactccctcggtaaagtccttcctactcaggacagaaatgacgagaacagggagctggaaacaggcccctaaccagagaagggaagtaatggatcaacaaagttaactagcaggtcaggatcacgcaattcatttcactctgactggtaacatgtgacagaaacagtgtaggcttattgtattttcatgtagagtaggacccaaaaatccacccaaagtcctttatctatgccacatccttcttatctatacttccaggacactttttcttccttatgataaggctctctctctctccacacacacacacacacacacacacacacacacacacacacacacaaacacacaccccgccaaccaaggtgcatgtaaaaagatgtagattcctctgcctttctcatctacacagcccaggagggtaagttaatataagagggatttattggtaagagatgatgcttaatctgtttaacactgggcctcaaagagagaatttcttttcttctgtacttattaagcacctattatgtgttgagcttatatatacaaagggttattatatgctaatatagtaatagtaatggtggttggtactatggtaattaccataaaaattattatccttttaaaataaagctaattattattggatcttttttagtattcattttatgttttttatgtttttgattttttaaaagacaatctcaccctgttacccaggctggagtgcagtggtgcaatcatagctttctgcagtcttgaactcctgggctcaagcaatcctcctgccttggcctcccaaagtgttgggatacagtcatgagccactgcatctggcctaggatccatttagattaaaatatgcattttaaattttaaaataatatggctaatttttaccttatgtaatgtgtatactggcaataaatctagtttgctgcctaaagtttaaagtgctttccagtaagcttcatgtacgtgaggggagacatttaaagtgaaacagacagccaggtgtggtggctcacgcctgtaatcccagcactctgggaggctgaggtgggtggatcgcttgagccctggagttcaagaccagcctgagcaacatggcaaaacgctgtttctataacaaaaattagccgggcatggtggcatgtgcctgtggtcccagctactagggggctgaggcaggagaatcgttggagcccaggaggtcaaggctgcactgagcagtgcttgcgccactgcactccagcctgggtgacaggaccagaccttgcctcaaaaaaataagaagaaaaattaaaaataaatggaaacaactacaaagagctgttgtcctagatgagctacttagttaggctgatattttggtatttaacttttaaagtcagggtctgtcacctgcactacattattaaaatatcaattctcaatgtatatccacacaaagactggtacgtgaatgttcatagtacctttattcacaaaaccccaaagtagagactatccaaatatccatcaacaagtgaacaaataaacaaaatgtgctatatccatgcaatggaataccaccctgcagtacaaagaagctacttggggatgaatcccaaagtcatgacgctaaatgaaagagtcagacatgaaggaggagataatgtatgccatacgaaattctagaaaatgaaagtaacttatagttacagaaagcaaatcagggcaggcatagaggctcacacctgtaatcccagcactttgagaggccacgtgggaagattgctagaactcaggagttcaagaccagcctgggcaacacagtgaaactccattctccacaaaaatgggaaaaaaagaaagcaaatcagtggttgtcctgtggggaggggaaggactgcaaagagggaagaagctctggtggggtgagggtggtgattcaggttctgtatcctgactgtggtagcagtttggggtgtttacatccaaaaatattcgtagaattatgcatcttaaatgggtggagtttactgtatgtaaattatacctcaatgtaagaaaaaataatgtgtaagaaaactttcaattctcttgccagcaaacgttattcaaattcctgagccctttacttcgcaaattctctgcacttctgccccgtaccattaggtgacagcactagctccacaaattggataaatgcatttctggaaaagactagggacaaaatccaggcatcacttgtgctttcatatcaaccatgctgtacagcttgtgttgctgtctgcagctgcaatggggactcttgatttctttaaggaaacttgggttaccagagtatttccacaaatgctattcaaattagtgcttatgatatgcaagacactgtgctaggagccagaaaacaaagaggaggagaaatcagtcattatgtgggaacaacatagcaagatatttagatcattttgactagttaaaaaagcagcagagtacaaaatcacacatgcaatcagtataatccaaatcatgtaaatatgtgcctgtagaaagactagaggaataaacacaagaatcttaacagtcattgtcattagacactaagtctaattattattattagacactatgatatttgagatttaaaaaatctttaatattttaaaatttagagctcttctatttttccatagtattcaagtttgacaatgatcaagtattactctttctttttttttttttttttttttttttgagatggagttttggtcttgttgcccatgctggagtggaatggcatgaccatagctcactgcaacctccacctcctgggttcaagcaaagctgtcgcctcagcctcccgggtagatgggattacaggcgcccaccaccacactcggctaatgtttgtatttttagtagagatggggtttcaccatgttggccaggctggtctcaaactcctgacctcagaggatccacctgcctcagcctcccaaagtgctgggattacagatgtaggccactgcgcccggccaagtattgctcttatacattaaaaaacaggtgtgagccactgcgcccagccaggtattgctcttatacattaaaaaataggccggtgcagtggctcacgcctgtaatcccagcactttgggaagccaaggcgggcagaacacccgaggtcaggagtccaaggccagcctggccaagatggtgaaaccccgtctctattaaaaatacaaacattacctgggcatgatggtgggcgcctgtaatcccagctactcaggaggctgaggcaggaggatccgcggagcctggcagatctgcctgagcctgggaggttgaggctacagtaagccaagatcatgccagtatacttcagcctgggcgacaaagtgagaccgtaacaaaaaaaaaaaaatttaaaaaaagaaatttagatcaagatccaactgtaaaaagtggcctaaacaccacattaaagagtttggagtttattctgcaggcagaagagaaccatcagggggtcttcagcatgggaatggcatggtgcacctggtttttgtgagatcatggtggtgacagtgtggggaatgttattttggagggactggaggcagacagaccggttaaaaggccagcacaacagataaggaggaagaagatgagggcttggaccgaagcagagaagagcaaacagggaaggtacaaattcaagaaatattggggggtttgaatcaacacatttagatgattaattaaatatgaggactgaggaataagaaatgagtcaaggatggttccaggctgctaggctgcttacctgaggtggcaaagtcgggaggagtggcagtttaggacagggggcagttgaggaatattgttttgatcattttgagtttgaggtacaagttggacacttaggtaaagactggaggggaaatctgaatatacaattatgggactgaggaacaagtttattttattttttgtttcgttttcttgttgaagaacaaatttaattgtaatcccaagtcatcagcatctagaagacagtggcaggaggtgactgtcttgtgggtaagggtttggggtccttgatgagtatctctcaattggccttaaatataagcaggaaaaggagtttatgatggattccaggctcagcagggctcaggagggctcaggcagccagcagaggaagtcagagcatcttctttggtttagcccaagtaatgacttccttaaaaagctgaaggaaaatccagagtgaccagattataaactgtactcttgcattttctctccctcctctcacccacagcctcttgatgaaccggaggaagtttctttaccaattcaaaaatgtccgctgggctaagggtcggcgtgagacctacctgtgctacgtagtgaagaggcgtgacagtgctacatccttttcactggactttggttatcttcgcaataaggtatcaattaaagtcggctttgcaagcagtttaatggtcaactgtgagtgcttttagagccacctgctgatggtattacttccatccttttttggcatttgtgtctctatcacattcctcaaatccttttttttatttctttttccatgtccatgcacccatattagacatggcccaaaatatgtgatttaattcctccccagtaatgctgggcaccctaataccactccttccttcagtgccaagaacaactgctcccaaactgtttaccagctttcctcagcatctgaattgcctttgagattaattaagctaaaagcatttttatatgggagaatattatcagcttgtccaagcaaaaattttaaatgtgaaaaacaaattgtgtcttaagcatttttgaaaattaaggaagaagaatttgggaaaaaattaacggtggctcaattctgtcttccaaatgatttcttttccctcctactcacatgggtcgtaggccagtgaatacattcaacatggtgatccccagaaaactcagagaagcctcggctgatgattaattaaattgatctttcggctacccgagagaattacatttccaagagacttcttcaccaaaatccagatgggtttacataaacttctgcccacgggtatctcctctctcctaacacgctgtgacgtctgggcttggtggaatctcagggaagcatccgtggggtggaaggtcatcgtctggctcgttgtttgatggttatattaccatgcaattttctttgcctacatttgtattgaatacatcccaatctccttcctattcggtgacatgacacattctatttcagaaggctttgattttatcaagcactttcatttacttctcatggcagtgcctattacttctcttacaatacccatctgtctgctttaccaaaatctatttccccttttcagatcctcccaaatggtcctcataaactgtcctgcctccacctagtggtccaggtatatttccacaatgttacatcaacaggcacttctagccattttccttctcaaaaggtgcaaaaagcaacttcataaacacaaattaaatcttcggtgaggtagtgtgatgctgcttcctcccaactcagcgcacttcgtcttcctcattccacaaaaacccatagccttccttcactctgcaggactagtgctgccaagggttcagctctacctactggtgtgctcttttgagcaagttgcttagcctctctgtaacacaaggacaatagctgcaagcatccccaaagatcattgcaggagacaatgactaaggctaccagagccgcaataaaagtcagtgaattttagcgtggtcctctctgtctctccagaacggctgccacgtggaattgctcttcctccgctacatctcggactgggacctagaccctggccgctgctaccgcgtcacctggttcacctcctggagcccctgctacgactgtgcccgacatgtggccgactttctgcgagggaaccccaacctcagtctgaggatcttcaccgcgcgcctctacttctgtgaggaccgcaaggctgagcccgaggggctgcggcggctgcaccgcgccggggtgcaaatagccatcatgaccttcaaaggtgcgaaagggccttccgcgcaggcgcagtgcagcagcccgcattcgggattgcgatgcggaatgaatgagttagtggggaagctcgaggggaagaagtgggcggggattctggttcacctctggagccgaaattaaagattagaagcagagaaaagagtgaatggctcagagacaaggccccgaggaaatgagaaaatggggccagggttgcttctttcccctcgatttggaacctgaactgtcttctacccccatatccccgcctttttttcctttttttttttttgaagattatttttactgctggaatacttttgtagaaaaccacgaaagaactttcaaagcctgggaagggctgcatgaaaattcagttcgtctctccagacagcttcggcgcatccttttggtaaggggcttcctcgctttttaaattttctttctttctctacagtcttttttggagtttcgtatatttcttatattttcttattgttcaatcactctcagttttcatctgatgaaaactttatttctcctccacatcagctttttcttctgctgtttcaccattcagagccctctgctaaggttccttttccctcccttttctttcttttgttgtttcacatctttaaatttctgtctctccccagggttgcgtttccttcctggtcagaattcttttctcctttttttttttttttttttttttttttaaacaaacaaacaaaaaacccaaaaaaactctttcccaatttactttcttccaacatgttacaaagccatccactcagtttagaagactctccggccccaccgacccccaacctcgttttgaagccattcactcaatttgcttctctctttctctacagcccctgtatgaggttgatgacttacgagacgcatttcgtactttgggactttgatagcaacttccaggaatgtcacacacgatgaaatatctctgctgaagacagtggataaaaaacagtccttcaagtcttctctgtttttattcttcaactctcactttcttagagtttacagaaaaaatatttatatacgactctttaaaaagatctatgtcttgaaaatagagaaggaacacaggtctggccagggacgtgctgcaattggtgcagttttgaatgcaacattgtcccctactgggaataacagaactgcaggacctgggagcatcctaaagtgtcaacgtttttctatgacttttaggtaggatgagagcagaaggtagatcctaaaaagcatggtgagaggatcaaatgtttttatatcaacatcctttattatttgattcatttgagttaacagtggtgttagtgatagatttttctattcttttcccttgacgtttactttcaagtaacacaaactcttccatcaggccatgatctataggacctcctaatgagagtatctgggtgattgtgaccccaaaccatctctccaaagcattaatatccaatcatgcgctgtatgttttaatcagcagaagcatgtttttatgtttgtacaaaagaagattgttatgggtggggatggaggtatagaccatgcatggtcaccttcaagctactttaataaaggatcttaaaatgggcaggaggactgtgaacaagacaccctaataatgggttgatgtctgaagtagcaaatcttctggaaacgcaaactcttttaaggaagtccctaatttagaaacacccacaaacttcacatatcataattagcaaacaattggaaggaagttgcttgaatgttggggagaggaaaatctattggctctcgtgggtctcttcatctcagaaatgccaatcaggtcaaggtttgctacattttgtatgtgtgtgatgcttctcccaaaggtatattaactatataagagagttgtgacaaaacagaatgataaagctgcgaaccgtggcacacgctcatagttctagctgcttgggaggttgaggagggaggatggcttgaacacaggtgttcaaggccagcctgggcaacataacaagatcctgtctctcaaaaaaaaaaaaaaaaaaaagaaagagagagggccgggcgtggtggctcacgcctgtaatcccagcactttgggaggccgagccgggcggatcacctgtggtcaggagtttgagaccagcctggccaacatggcaaaaccccgtctgtactcaaaatgcaaaaattagccaggcgtggtagcaggcacctgtaatcccagctacttgggaggctgaggcaggagaatcgcttgaacccaggaggtggaggttgcagtaagctgagatcgtgccgttgcactccagcctgggcgacaagagcaagactctgtctcagaaaaaaaaaaaaaaaagagagagagagagaaagagaacaatatttgggagagaaggatggggaagcattgcaaggaaattgtgctttatccaacaaaatgtaaggagccaataagggatccctatttgtctcttttggtgtctatttgtccctaacaactgtctttgacagtgagaaaaatattcagaataaccatatccctgtgccgttattacctagcaacccttgcaatgaagatgagcagatccacaggaaaacttgaatgcacaactgtcttattttaatcttattgtacataagtttgtaaaagagttaaaaattgttacttcatgtattcatttatattttatattattttgcgtctaatgattttttattaacatgatttccttttctgatatattgaaatggagtctcaaagcttcataaatttataactttagaaatgattctaataacaacgtatgtaattgtaacattgcagtaatggtgctacgaagccatttctcttgatttttagtaaacttttatgacagcaaatttgcttctggctcactttcaatcagttaaataaatgataaataattttggaagctgtgaagataaaataccaaataaaataatataaaagtgatttatatgaagttaaaataaaaaatcagtatgatggaataaacttg

SEQ ID NO: 16 - protein, 198 aa, Homo sapiens [sequence omitted]

SEQ ID NO: 17 - protein, 198 aa, Canis lupus
  REGION 1..198: note = MISC_FEATURE - Canine AID (clAID) polypeptide sequence
  REGION 1..30: note = MISC_FEATURE - Nuclear localization sequence
  REGION 183..198: note = MISC_FEATURE - Nuclear export signal
MDSLLMKQRKFLYHFKNVRWAKGRHETYLCYVVKRRDSATSFSLDFGHLRNKSGCHVELLFLRYISDWDLDPGRCYRVTWFTSWSPCYDCARHVADFLRGYPNLSLRIFAARLYFCEDRKAEPEGLRRLHRAGVQIAIMTFKDYFYCWNTFVENREKTFKAWEGLHENSVRLSRQLRRILLPLYEVDDLRDAFRTLGL

SEQ ID NO: 18 - protein, 199 aa, Bos taurus
  REGION 1..199: note = MISC_FEATURE - Bovine AID (btAID) polypeptide sequence
  REGION 1..30: note = MISC_FEATURE - Nuclear localization sequence
  REGION 183..199: note = MISC_FEATURE - Nuclear export signal
MDSLLKKQRQFLYQFKNVRWAKGRHETYLCYVVKRRDSPTSFSLDFGHLRNKAGCHVELLFLRYISDWDLDPGRCYRVTWFTSWSPCYDCARHVADFLRGYPNLSLRIFTARLYFCDKERKAEPEGLRRLHRAGVQIAIMTFKDYFYCWNTFVENHERTFKAWEGLHENSVRLSRQLRRILLPLYEVDDLRDAFRTLGL

SEQ ID NO: 19 - protein, 239 aa, Rattus sp.
  REGION 1..239: note = MISC_FEATURE - Rat AID polypeptide sequence
  REGION 1..26: note = MISC_FEATURE - Nuclear localization sequence
  REGION 194..239: note = MISC_FEATURE - Nuclear export signal
MAVGSKPKAALVGPHWERERIWCFLCSTGLGTQQTGQTSRWLRPAATQDPVSPPRSLLMKQRKFLYHFKNVRWAKGRHETYLCYVVKRRDSATSFSLDFGYLRNKSGCHVELLFLRYISDWDLDPGRCYRVTWFTSWSPCYDCARHVADFLRGNPNLSLRIFTARLTGWGALPAGLMSPARPSDYFYCWNTFVENHERTFKAWEGLHENSVRLSRRLRRILLPLYEVDDLRDAFRTLGL

SEQ ID NO: 20 - protein, 198 aa, Mus musculus [sequence omitted]

SEQ ID NO: 21 - protein, 229 aa, Rattus norvegicus [sequence omitted]

SEQ ID NO: 22 - protein, 229 aa, Mesocricetus auratus
  REGION 1..229: note = MISC_FEATURE - maAPOBEC-1 polypeptide sequence
MSSETGPVVVDPTLRRRIEPHEFDAFFDQGELRKETCLLYEIRWGGRHNIWRHTGQNTSRHVEINFIEKFTSERYFYPSTRCSIVWFLSWSPCGECSKAITEFLSGHPNVTLFIYAARLYHHTDQRNRQGLRDLISRGVTIRIMTEQEYCYCWRNFVNYPPSNEVYWPRYPNLWMRLYALELYCIHLGLPPCLKIKRRHQYPLTFFRLNLQSCHYQRIPPHILWATGFI

SEQ ID NO: 23 - protein, 236 aa, Pongo pygmaeus
  REGION 1..236: note = MISC_FEATURE - ppAPOBEC-1 polypeptide sequence
MTSEKGPSTGDPTLRRRIESWEFDVFYDPRELRKETCLLYEIKWGMSRKIWRSSGKNTTNHVEVNFIKKFTSERRFHSSISCSITWFLSWSPCWECSQAIREFLSQHPGVTLVIYVARLFWHMDQRNRQGLRDLVNSGVTIQIMRASEYYHCWRNFVNYPPGDEAHWPQYPPLWMMLYALELHCIILSLPPCLKISRRWQNHLAFFRLHLQNCHYQTIPPHILLATGLIHPSVTWR

SEQ ID NO: 24 - protein, 236 aa, Oryctolagus cuniculus
  REGION 1..236: note = MISC_FEATURE - ocAPOBEC1 polypeptide sequence
MASEKGPSNKDYTLRRRIEPWEFEVFFDPQELRKEACLLYEIKWGASSKTWRSSGKNTTNHVEVNFLEKLTSEGRLGPSTCCSITWFLSWSPCWECSMAIREFLSQHPGVTLIIFVARLFQHMDRRNRQGLKDLVTSGVTVRVMSVSEYCYCWENFVNYPPGKAAQWPRYPPRWMLMYALELYCIILGLPPCLKISRRHQKQLTFFSLTPQYCHYKMIPPYILLATGLLQPSVPWR

SEQ ID NO: 25 - protein, 235 aa, Monodelphis domestica
  REGION 1..235: note = MISC_FEATURE - mdAPOBEC-1 polypeptide sequence
MNSKTGPSVGDATLRRRIKPWEFVAFFNPQELRKETCLLYEIKWGNQNIWRHSNQNTSQHAEINFMEKFTAERHFNSSVRCSITWFLSWSPCWECSKAIRKFLDHYPNVTLAIFISRLYWHMDQQHRQGLKELVHSGVTIQIMSYSEYHYCWRNFVDYPQGEEDYWPKYPYLWIMLYVLELHCIILGLPPCLKISGSHSNQLALFSLDLQDCHYQKIPYNVLVATGLVQPFVTWR

SEQ ID NO: 26 - protein, 224 aa, Pongo pygmaeus
  REGION 1..224: note = MISC_FEATURE - ppAPOBEC-2 polypeptide sequence
MAQKEEAAAATEAASQNGEDLENLDDPEKLKELIELPPFEIVTGERLPANFFKFQFRNVEYSSGRNKTFLCYVVEAQGKGGQVQASRGYLEDEHAAAHAEEAFFNTILPAFDPALRYNVTWYVSSSPCAACADRIIKTLSKTKNLRLLILVGRLFMWEELEIQDALKKLKEAGCKLRIMKPQDFEYVWQNFVEQEEGESKAFQPWEDIQENFLYYEEKLADILK

SEQ ID NO: 27 - protein, 224 aa, Bos taurus
  REGION 1..224: note = MISC_FEATURE - btAPOBEC-2 polypeptide sequence
MAQKEEAAAAAEPASQNGEEVENLEDPEKLKELIELPPFEIVTGERLPAHYFKFQFRNVEYSSGRNKTFLCYVVEAQSKGGQVQASRGYLEDEHATNHAEEAFFNSIMPTFDPALRYMVTWYVSSSPCAACADRIVKTLNKTKNLRLLILVGRLFMWEEPEIQAALRKLKEAGCRLRIMKPQDFEYIWQNFVEQEEGESKAFEPWEDIQENFLYYEEKLADILK

SEQ ID NO: 28 - protein, 440 aa, Mus musculus
  REGION 1..440: note = MISC_FEATURE - mAPOBEC-3-(1) polypeptide sequence
MQPQRLGPRAGMGPFCLGCSHRKCYSPIRNLISQETFKFHFKNLGYAKGRKDTFLCYEVTRKDCDSPVSLHHGVFKNKDNIHAEICFLYWFHDKVLKVLSPREEFKITWYMSWSPCFECAEQIVRFLATHHNLSLDIFSSRLYNVQDPETQQNLCRLVQEGAQVAAMDLYEFKKCWKKFVDNGGRRFRPWKRLLTNFRYQDSKLQEILRPCYISVPSSSSSTLSNICLTKGLPETRFWVEGRRMDPLSEEEFYSQFYNQRVKHLCYYHRMKPYLCYQLEQFNGQAPLKGCLLSEKGKQHAEILFLDKIRSMELSQVTITCYLTWSPCPNCAWQLAAFKRDRPDLILHIYTSRLYFHWKRPFQKGLCSLWQSGILVDVMDLPQFTDCWTNFVNPKRPFWPWKGLEIISRRTQRRLRRIKESWGLQDLVNDFGNLQLGPPMS

SEQ ID NO: 29 - protein, 429 aa, Mus musculus
  REGION 1..429: note = MISC_FEATURE - APOBEC-3-(2) (Mouse APOBEC-3) polypeptide sequence
  REGION 71..108: note = MISC_FEATURE - Nucleic acid editing domain
  REGION 288..319: note = MISC_FEATURE - Nucleic acid editing domain
MGPFCLGCSHRKCYSPIRNLISQETFKFHFKNLGYAKGRKDTFLCYEVTRKDCDSPVSLHHGVFKNKDNIHAEICFLYWFHDKVLKVLSPREEFKITWYMSWSPCFECAEQIVRFLATHHNLSLDIFSSRLYNVQDPETQQNLCRLVQEGAQVAAMDLYEFKKCWKKFVDNGGRRFRPWKRLLTNFRYQDSKLQEILRPCYIPVPSSSSSTLSNICLTKGLPETRFCVEGRRMDPLSEEEFYSQFYNQRVKHLCYYHRMKPYLCYQLEQFNGQAPLKGCLLSEKGKQHAEILFLDKIRSMELSQVTITCYLTWSPCPNCAWQLAAFKRDRPDLILHIYTSRLYFHWKRPFQKGLCSLWQSGILVDVMDLPQFTDCWTNFVNPKRPFWPWKGLEIISRRTQRRLRRIKESWGLQDLVNDFGNLQLGPPMS

SEQ ID NO: 30 - protein, 430 aa, Rattus sp.
  REGION 1..430: note = MISC_FEATURE - APOBEC-3 polypeptide sequence
  REGION 72..109: note = MISC_FEATURE - Nucleic acid editing domain
  REGION 289..320: note = MISC_FEATURE - Nucleic acid editing domain
MGPFCLGCSHRKCYSPIRNLISQETFKFHFKNRLRYAIDRKDTFLCYEVTRKDCDSPVSLHHGVFKNKDNIHAEICFLYWFHDKVLKVLSPREEFKITWYMSWSPCFECAEQVLRFLATHHNLSLDIFSSRLYNIRDPENQQNLCRLVQEGAQVAAMDLYEFKKCWKKFVDNGGRRFRPWKKLLTNFRYQDSKLQEILRPCYIPVPSSSSSTLSNICLTKGLPETRFCVERRRVHLLSEEEFYSQFYNQRVKHLCYYHGVKPYLCYQLEQFNGQAPLKGCLLSEKGKQHAEILFLDKIRSMELSQVIITCYLTWSPCPNCAWQLAAFKRDRPDLILHIYTSRLYFHWKRPFQKGLCSLWQSGILVDVMDLPQFTDCWTNFVNPKRPFWPWKGLEIISRRTQRRLHRIKESWGLQDLVNDFGNLQLGPPMS

SEQ ID NO: 31 - protein, 199 aa, Homo sapiens
  REGION 1..199: note = MISC_FEATURE - hAPOBEC-3A polypeptide sequence
  REGION 70..106: note = MISC_FEATURE - Nucleic acid editing domain
MEASPASGPRHLMDPHIFTSNFNNGIGRHKTYLCYEVERLDNGTSVKMDQHRGFLHNQAKNLLCGFYGRHAELRFLDLVPSLQLDPAQIYRVTWFISWSPCFSWGCAGEVRAFLQENTHVRLRIFAARIYDYDPLYKEALQMLRDAGAQVSIMTYDEFKHCWDTFVDHQGCPFQPWDGLDEHSQALSGRLRAILQNQGN

SEQ ID NO: 32 - protein, 373 aa, Homo sapiens
  REGION 1..373: note = MISC_FEATURE - hAPOBEC-3F polypeptide sequence
  REGION 65..99: note = MISC_FEATURE - Nucleic acid editing domain
  REGION 248..283: note = MISC_FEATURE - Nucleic acid editing domain
MKPHFRNTVERMYRDTFSYNFYNRPILSRRNTVWLCYEVKTKGPSRPRLDAKIFRGQVYSQPEHHAEMCFLSWFCGNQLPAYKCFQITWFVSWTPCPDCVAKLAEFLAEHPNVTLTISAARLYYYWERDYRRALCRLSQAGARVKIMDDEEFAYCWENFVYSEGQPFMPWYKFDDNYAFLHRTLKEILRNPMEAMYPHIFYFHFKNLRKAYGRNESWLCFTMEVVKHHSPVSWKRGVFRNQVDPETHCHAERCFLSWFCDDILSPNTNYEVTWYTSWSPCPECAGEVAEFLARHSNVNLTIFTARLYYFWDTDYQEGLRSLSQEGASVEIMGYKDFKYCWENFVYNDDEPFKPWKGLKYNFLFLDSKLQEILE

SEQ ID NO: 33 - protein, 370 aa, Macaca mulatta
  REGION 1..370: note = MISC_FEATURE - Rhesus macaque APOBEC-3G polypeptide sequence
  REGION 1..61: note = MISC_FEATURE - Cytoplasmic localization signal
MVEPMDPRTFVSNFNNRPILSGLNTVWLCCEVKTKDPSGPPLDAKIFQGKVYSKAKYHPEMRFLRWFHKWRQLHHDQEYKVTWYVSWSPCTRCANSVATFLAKDPKVTLTIFVARLYYFWKPDYQQALRILCQKRGGPHATMKIMNYNEFQDCWNKFVDGRGKPFKPRNNLPKHYTLLQATLGELLRHLMDPGTFTSNFNNKPWVSGQHETYLCYKVERLHNDTWVPLNQHRGFLRNQAPNIHGFPKGRHAELCFLDLIPFWKLDGQQYRVTCFTSWSPCFSCAQEMAKFISNNEHVSLCIFAARIYDDQGRYQEGLRALHRDGAKIAMMNYSEFEYCWDTFVDRQGRPFQPWDGLDEHSQALSGRLRAI

SEQ ID NO: 34 - protein, 384 aa, Pan troglodytes
  REGION 1..384: note = MISC_FEATURE - Chimpanzee APOBEC-3G polypeptide sequence
  REGION 1..60: note = MISC_FEATURE - Cytoplasmic localization signal
  REGION 65..100: note = MISC_FEATURE - Nucleic acid editing domain
  REGION 257..291: note = MISC_FEATURE - Nucleic acid editing domain
MKPHFRNPVERMYQDTFSDNFYNRPILSHRNTVWLCYEVKTKGPSRPPLDAKIFRGQVYSKLKYHPEMRFFHWFSKWRKLHRDQEYEVTWYISWSPCTKCTRDVATFLAEDPKVTLTIFVARLYYFWDPDYQEALRSLCQKRDGPRATMKIMNYDEFQHCWSKFVYSQRELFEPWNNLPKYYILLHIMLGEILRHSMDPPTFTSNFNNELWVRGRHETYLCYEVERLHNDTWVLLNQRRGFLCNQAPHKHGFLEGRHAELCFLDVIPFWKLDLHQDYRVTCFTSWSPCFSCAQEMAKFISNNKHVSLCIFAARIYDDQGRCQEGLRTLAKAGAKISIMTYSEFKHCWDTFVDHQGCPFQPWDGLEEHSQALSGRLRAILQNQGN

SEQ ID NO: 35 - protein, 377 aa, Chlorocebus sabaeus
  REGION 1..377: note = MISC_FEATURE - Green monkey APOBEC-3G polypeptide sequence
  REGION 1..60: note = MISC_FEATURE - Cytoplasmic localization signal
  REGION 65..100: note = MISC_FEATURE - Nucleic acid editing domain
  REGION 257..290: note = MISC_FEATURE - Nucleic acid editing domain
MNPQIRNMVEQMEPDIFVYYFNNRPILSGRNTVWLCYEVKTKDPSGPPLDANIFQGKLYPEAKDHPEMKFLHWFRKWRQLHRDQEYEVTWYVSWSPCTRCANSVATFLAEDPKVTLTIFVARLYYFWKPDYQQALRILCQERGGPHATMKIMNYNEFQHCWNEFVDGQGKPFKPRKNLPKHYTLLHATLGELLRHVMDPGTFTSNFNNKPWVSGQRETYLCYKVERSHNDTWVLLNQHRGFLRNQAPDRHGFPKGRHAELCFLDLIPFWKLDDQQYRVTCFTSWSPCFSCAQKMAKFISNNKHVSLCIFAARIYDDQGRCQEGLRTLHRDGAKIAVMNYSEFEYCWDTFVDRQGRPFQPWDGLDEHSQALSGRLRAI

SEQ ID NO: 36 - protein, 384 aa, Homo sapiens
  REGION 1..384: note = MISC_FEATURE - Human APOBEC-3G polypeptide sequence
  REGION 1..60: note = MISC_FEATURE - Cytoplasmic localization signal
  REGION 65..100: note = MISC_FEATURE - Nucleic acid editing domain
  REGION 257..291: note = MISC_FEATURE - Nucleic acid editing domain
MKPHFRNTVERMYRDTFSYNFYNRPILSRRNTVWLCYEVKTKGPSRPPLDAKIFRGQVYSELKYHPEMRFFHWFSKWRKLHRDQEYEVTWYISWSPCTKCTRDMATFLAEDPKVTLTIFVARLYYFWDPDYQEALRSLCQKRDGPRATMKIMNYDEFQHCWSKFVYSQRELFEPWNNLPKYYILLHIMLGEILRHSMDPPTFTFNFNNEPWVRGRHETYLCYEVERMHNDTWVLLNQRRGFLCNQAPHKHGFLEGRHAELCFLDVIPFWKLDLDQDYRVTCFTSWSPCFSCAQEMAKFISKNKHVSLCIFTARIYDDQGRCQEGLRTLAEAGAKISIMTYSEFKHCWDTFVDHQGCPFQPWDGLDEHSQDLSGRLRAILQNQEN

SEQ ID NO: 37 - protein, 382 aa, Homo sapiens
  REGION 1..382: note = MISC_FEATURE - Human APOBEC-3B polypeptide sequence
  REGION 66..100: note = MISC_FEATURE - Nucleic acid editing domain
  REGION 251..289: note = MISC_FEATURE - Nucleic acid editing domain
MNPQIRNPMERMYRDTFYDNFENEPILYGRSYTWLCYEVKIKRGRSNLLWDTGVFRGQVYFKPQYHAEMCFLSWFCGNQLPAYKCFQITWFVSWTPCPDCVAKLAEFLSEHPNVTLTISAARLYYYWERDYRRALCRLSQAGARVTIMDYEEFAYCWENFVYNEGQQFMPWYKFDENYAFLHRTLKEILRYLMDPDTFTFNFNNDPLVLRRRQTYLCYEVERLDNGTWVLMDQHMGFLCNEAKNLLCGFYGRHAELRFLDLVPSLQLDPAQIYRVTWFISWSPCFSWGCAGEVRAFLQENTHVRLRIFAARIYDYDPLYKEALQMLRDAGAQVSIMTYDEFEYCWDTFVYRQGCPFQPWDGLEEHSQALSGRLRAILQNQGN

SEQ ID NO: 38 - protein, 395 aa, Rattus sp.
  REGION 1..395: note = MISC_FEATURE - Rat APOBEC-3B polypeptide sequence
MQPQGLGPNAGMGPVCLGCSHRRPYSPIRNPLKKLYQQTFYFHFKNVRYAWGRKNNFLCYEVNGMDCALPVPLRQGVFRKQGHIHAELCFIYWFHDKVLRVLSPMEEFKVTWYMSWSPCSKCAEQVARFLAAHRNLSLAIFSSRLYYYLRNPNYQQKLCRLIQEGVHVAAMDLPEFKKCWNKFVDNDGQPFRPWMRLRINFSFYDCKLQEIFSRMNLLREDVFYLQFNNSHRVKPVQNRYYRRKSYLCYQLERANGQEPLKGYLLYKKGEQHVEILFLEKMRSMELSQVRITCYLTWSPCPNCARQLAAFKKDHPDLILRIYTSRLYFWRKKFQKGLCTLWRSGIHVDVMDLPQFADCWTNFVNPQRPFRPWNELEKNSWRIQRRLRRIKESWGL

SEQ ID NO: 39 - protein, 226 aa, Bos taurus
  REGION 1..226: note = MISC_FEATURE - Bovine APOBEC-3B polypeptide sequence
DGWEVAFRSGTVLKAGVLGVSMTEGWAGSGHPGQGACVWTPGTRNTMNLLREVLFKQQFGNQPRVPAPYYRRKTYLCYQLKQRNDLTLDRGCFRNKKQRHAERFIDKINSLDLNPSQSYKIICYITWSPCPNCANELVNFITRNNHLKLEIFASRLYFHWIKSFKMGLQDLQNAGISVAVMTHTEFEDCWEQFVDNQSRPFQPWDKLEQYSASIRRRLQRILTAPI

SEQ ID NO: 40 - protein, 490 aa, Pan troglodytes
  REGION 1..490: note = MISC_FEATURE - Chimpanzee APOBEC-3B polypeptide sequence
MNPQIRNPMEWMYQRTFYYNFENEPILYGRSYTWLCYEVKIRRGHSNLLWDTGVFRGQMYSQPEHHAEMCFLSWFCGNQLSAYKCFQITWFVSWTPCPDCVAKLAKFLAEHPNVTLTISAARLYYYWERDYRRALCRLSQAGARVKIMDDEEFAYCWENFVYNEGQPFMPWYKFDDNYAFLHRTLKEIIRHLMDPDTFTFNFNNDPLVLRRHQTYLCYEVERLDNGTWVLMDQHMGFLCNEAKNLLCGFYGRHAELRFLDLVPSLQLDPAQIYRVTWFISWSPCFSWGCAGQVRAFLQENTHVRLRIFAARIYDYDPLYKEALQMLRDAGAQVSIMTYDEFEYCWDTFVYRQGCPFQPWDGLEEHSQALSGRLRAILQVRASSLCMVPHRPPPPPQSPGPCLPLCSEPPLGSLLPTGRPAPSLPFLLTASFSFPPPASLPPLPSLSLSPGHLPVPSFHSLTSCSIQPPCSSRIRETEGWASVSKEGRDLG

SEQ ID NO: 41 - protein, 190 aa, Homo sapiens
  REGION 1..190: note = MISC_FEATURE - Human APOBEC-3C polypeptide sequence
  REGION 65..100: note = MISC_FEATURE - Nucleic acid editing domain
MNPQIRNPMKAMYPGTFYFQFKNLWEANDRNETWLCFTVEGIKRRSVVSWKTGVFRNQVDSETHCHAERCFLSWFCDDILSPNTKYQVTWYTSWSPCPDCAGEVAEFLARHSNVNLTIFTARLYYFQYPCYQEGLRSLSQEGVAVEIMDYEDFKYCWENFVYNDNEPFKPWKGLKTNFRLLKRRLRESLQ

SEQ ID NO: 42 - protein, 190 aa, Gorilla sp.
  REGION 1..190: note = MISC_FEATURE - Gorilla APOBEC-3C polypeptide sequence
  REGION 65..100: note = MISC_FEATURE - Nucleic acid editing domain
MNPQIRNPMKAMYPGTFYFQFKNLWEANDRNETWLCFTVEGIKRRSVVSWKTGVFRNQVDSETHCHAERCFLSWECDDILSPNTNYQVTWYTSWSPCPECAGEVAEFLARHSNVNLTIFTARLYYFQDTDYQEGLRSLSQEGVAVKIMDYKDFKYCWENFVYNDDEPFKPWKGLKYNFRFLKRRLQEILE

SEQ ID NO: 43 - protein, 202 aa, Macaca mulatta
  REGION 1..202: note = MISC_FEATURE - Rhesus macaque APOBEC-3A polypeptide sequence
  REGION 72..103: note = MISC_FEATURE - Nucleic acid editing domain
MDGSPASRPRHLMDPNTFTFNFNNDLSVRGRHQTYLCYEVERLDNGTWVPMDERRGFLCNKAKNVPCGDYGCHVELRFLCEVPSWQLDPAQTYRVTWFISWSPCFRRGCAGQVRVFLQENKHVRLRIFAARIYDYDPLYQEALRTLRDAGAQVSIMTYEEFKHCWDTFVDRQGRPFQPWDGLDEHSQALSGRLRAILQNQGN

SEQ ID NO: 44 - protein, 185 aa, Bos taurus
  REGION 1..185: note = MISC_FEATURE - Bovine APOBEC-3A polypeptide sequence
  REGION 56..86: note = MISC_FEATURE - Nucleic acid editing domain
MDEYTFTENFNNQGWPSKTYLCYEMERLDGDATIPLDEYKGFVRNKGLDQPEKPCHAELYFLGKIHSWNLDRNQHYRLTCFISWSPCYDCAQKLTTFLKENHHISLHILASRIYTHNRFGCHQSGLCELQAAGARITIMTFEDFKHCWETFVDHKGKPFQPWEGLNVKSQALCTELQAILKTQQN

SEQ ID NO: 45 - protein, 200 aa, Homo sapiens
  REGION 1..200: note = MISC_FEATURE - Human APOBEC-3H polypeptide sequence
  REGION 54..88: note = MISC_FEATURE - Nucleic acid editing domain
MALLTAETFRLQFNNKRRLRRPYYPRKALLCYQLTPQNGSTPTRGYFENKKKCHAEICFINEIKSMGLDETQCYQVTCYLTWSPCSSCAWELVDFIKAHDHLNLGIFASRLYYHWCKPQQKGLRLLCGSQVPVEVMGFPKFADCWENFVDHEKPLSFNPYKMLEELDKNSRAIKRRLERIKIPGVRAQGRYMDILCDAEV

SEQ ID NO: 46 - protein, 210 aa, Macaca mulatta
  REGION 1..210: note = MISC_FEATURE - Rhesus macaque APOBEC-3H polypeptide sequence
MALLTAKTFSLQFNNKRRVNKPYYPRKALLCYQLTPQNGSTPTRGHLKNKKKDHAEIRFINKIKSMGLDETQCYQVTCYLTWSPCPSCAGELVDFIKAHRHLNLRIFASRLYYHWRPNYQEGLLLLCGSQVPVEVMGLPEFTDCWENFVDHKEPPSFNPSEKLEELDKNSQAIKRRLERIKSRSVDVLENGLRSLQLGPVTPSSSIRNSR

SEQ ID NO: 47 - protein, 386 aa, Homo sapiens
  REGION 1..386: note = MISC_FEATURE - Human APOBEC-3D polypeptide sequence
  REGION 78..109: note = MISC_FEATURE - Nucleic acid editing domain
  REGION 262..296: note = MISC_FEATURE - Nucleic acid editing domain
MNPQIRNPMERMYRDTFYDNFENEPILYGRSYTWLCYEVKIKRGRSNLLWDTGVFRGPVLPKRQSNHRQEVYFRFENHAEMCFLSWFCGNRLPANRRFQITWFVSWNPCLPCVVKVTKFLAEHPNVTLTISAARLYYYRDRDWRWVLLRLHKAGARVKIMDYEDFAYCWENFVCNEGQPFMPWYKFDDNYASLHRTLKEILRNPMEAMYPHIFYFHFKNLLKACGRNESWLCFTMEVTKHHSAVFRKRGVFRNQVDPETHCHAERCFLSWFCDDILSPNTNYEVTWYTSWSPCPECAGEVAEFLARHSNVNLTIFTARLCYFWDTDYQEGLCSLSQEGASVKIMGYKDFVSCWKNFVYSDDEPFKPWKGLQTNFRLLKRRLREILQ

SEQ ID NO: 48 - protein, 236 aa, Homo sapiens
  REGION 1..236: note = MISC_FEATURE - Human APOBEC-1 polypeptide sequence
MTSEKGPSTGDPTLRRRIEPWEFDVFYDPRELRKEACLLYEIKWGMSRKIWRSSGKNTTNHVEVNFIKKFTSERDFHPSMSCSITWFLSWSPCWECSQAIREFLSRHPGVTLVIYVARLFWHMDQQNRQGLRDLVNSGVTIQIMRASEYYHCWRNFVNYPPGDEAHWPQYPPLWMMLYALELHCIILSLPPCLKISRRWQNHLTFFRLHLQNCHYQTIPPHILLATGLIHPSVAWR

SEQ ID NO: 49 - protein, 229 aa, Mus musculus
  REGION 1..229: note = MISC_FEATURE - Mouse APOBEC-1 polypeptide sequence
MSSETGPVAVDPTLRRRIEPHEFEVFFDPRELRKETCLLYEINWGGRHSVWRHTSQNTSNHVEVNFLEKFTTERYFRPNTRCSITWFLSWSPCGECSRAITEFLSRHPYVTLFIYIARLYHHTDQRNRQGLRDLISSGVTIQIMTEQEYCYCWRNFVNYPPSNEAYWPRYPHLWVKLYVLELYCIILGLPPCLKILRRKQPQLTFFTITLQTCHYQRIPPHLLWATGLK

SEQ ID NO: 50 - protein, 224 aa, Homo sapiens
  REGION 1..224: note = MISC_FEATURE - Human APOBEC-2 polypeptide sequence
MAQKEEAAVATEAASQNGEDLENLDDPEKLKELIELPPFEIVTGERLPANFFKFQFRNVEYSSGRNKTFLCYVVEAQGKGGQVQASRGYLEDEHAAAHAEEAFFNTILPAFDPALRYNVTWYVSSSPCAACADRIIKTLSKTKNLRLLILVGRLFMWEEPEIQAALKKLKEAGCKLRIMKPQDFEYVWQNFVEQEEGESKAFQPWEDIQENFLYYEEKLADILK

SEQ ID NO: 51 - protein, 224 aa, Mus musculus
  REGION 1..224: note = MISC_FEATURE - Mouse APOBEC-2 polypeptide sequence
MAQKEEAAEAAAPASQNGDDLENLEDPEKLKELIDLPPFEIVTGVRLPVNFFKFQFRNVEYSSGRNKTFLCYVVEVQSKGGQAQATQGYLEDEHAGAHAEEAFFNTILPAFDPALKYNVTWYVSSSPCAACADRILKTLSKTKNLRLLILVSRLFMWEEPEVQAALKKLKEAGCKLRIMKPQDFEYIWQNFVEQEEGESKAFEPWEDIQENFLYYEEKLADILK

SEQ ID NO: 52 - protein, 224 aa, Rattus sp.
  REGION 1..224: note = MISC_FEATURE - Rat APOBEC-2 polypeptide sequence
MAQKEEAAEAAAPASQNGDDLENLEDPEKLKELIDLPPFEIVTGVRLPVNFFKFQFRNVEYSSGRNKTFLCYVVEAQSKGGQVQATQGYLEDEHAGAHAEEAFFNTILPAFDPALKYNVTWYVSSSPCAACADRILKTLSKTKNLRLLILVSRLFMWEEPEVQAALKKLKEAGCKLRIMKPQDFEYLWQNFVEQEEGESKAFEPWEDIQENFLYYEEKLADILK

SEQ ID NO: 53 - protein, 208 aa, Petromyzon marinus
  REGION 1..208: note = MISC_FEATURE - Petromyzon marinus CDA1 (pmCDAl) polypeptide sequence
MTDAEYVRIHEKLDIYTFKKQFFNNKKSVSHRCYVLFELKRRGERRACFWGYAVNKPQSGTERGIHAEIFSIRKVEEYLRDNPGQFTINWYSSWSPCADCAEKILEWYNQELRGNGHTLKIWACKLYYEKNARNQIGLWNLRDNGVGLNVMVSEHYQCCRKIFIQSSHNQLNENRWLEKTLKRAEKRRSELSFMIQVKILHTTKSPAV

SEQ ID NO: 54 - protein, 381 aa, Homo sapiens
  REGION 1..381: note = MISC_FEATURE - Human APOBEC3G D316R D317R polypeptide sequence
MKPHFRNTVERMYRDTFSYNFYNRPILSRRNTVWLCYEVKTKGPSRPPLDAKIFRGQVYSELKYHPEMRFFHWFSKWRKLHRDQEYEVTWYISWSPCTKCTRDMATFLAEDPKVTLTIFVARLYYFWDPDYQEALRSLCQKRDGPRATMKFNYDEFQHCWSKFVYSQRELFEPWNNLPKYYILLHFMLGEILRHSMDPPTFTFNFNNEPWVRGRHETYLCYEVERMHNDTWVLLNQRRGFLCNQAPHKHGFLEGRHAELCFLDVIPFWKLDLDQDYRVTCFTSWSPCFSCAQEMAKFISKKHVSLCIFTARIYRRQGRCQEGLRTLAEAGAKISFTYSEFKHCWDTFVDHQGCPFQPWDGLDEHSQDLSGRLRAILQNQEN

SEQ ID NO: 55 - protein, 182 aa, Homo sapiens
  REGION 1..182: note = MISC_FEATURE - Human APOBEC3G chain A polypeptide sequence
MDPPTFTFNFNNEPWWGRHETYLCYEVERMHNDTWVLLNQRRGFLCNQAPHKHGFLEGRHAELCFLDVIPFWKLDLDQDYRVTCFTSWSPCFSCAQEMAKFISKNKHVSLCIFTARIYDDQGRCQEGLRTLAEAGAKISFTYSEFKHCWDTFVDHQGCPFQPWDGLDEHSQDLSGRLRAILQ

SEQ ID NO: 56 - protein, 184 aa, Homo sapiens
  REGION 1..184: note = MISC_FEATURE - Human APOBEC3G chain A D120R D121R polypeptide sequence
MDPPTFTFNFNNEPWVRGRHETYLCYEVERMHNDTWVLLNQRRGFLCNQAPHKHGFLEGRHAELCFLDVIPFWKLDLDQDYRVTCFTSWSPCFSCAQEMAKFISKNKHVSLCIFTARIYRRQGRCQEGLRTLAEAGAKISFMTYSEFKHCWDTFVDHQGCPFQPWDGLDEHSQDLSGRLRAILQ

SEQ ID NO: 57 - protein, 367 aa, Homo sapiens
  REGION 1..367: note = MISC_FEATURE - hAPOBEC-4 polypeptide sequence
MEPIYEEYLANHGTIVKPYYWLSFSLDCSNCPYHIRTGEEARVSLTEFCQIFGFPYGTTFPQTKHLTFYELKTSSGSLVQKGHASSCTGNYIHPESMLFEMNGYLDSAIYNNDSIRHIILYSNNSPCNEANHCCISKMYNFLITYPGITLSIYFSQLYHTEMDFPASAWNREALRSLASLWPRVVLSPISGGIWHSVLHSFISGVSGSHVFQPILTGRALADRHNAYEINAITGVKPYFTDVLLQTKRNPNTKAQEALESYPLNNAFPGQFFQMPSGQLQPNLPPDLRAPVVFVLVPLRDLPPMHMGQNPNKPRNIVRHLNMPQMSFQETKDLGRLPTGRSVEIVEITEQFASSKEADEKKKKKGKK

SEQ ID NO: 58 - protein, 388 aa, Rattus norvegicus
  REGION 1..388: note = MISC_FEATURE - rAPOBEC-4 polypeptide sequence
MEPLYEEYLTHSGTIVKPYYWLSVSLNCTNCPYHIRTGEEARVPYTEFHQTFGFPWSTYPQTKHLTFYELRSSSGNLIQKGLASNCTGSHTHPESMLFERDGYLDSLIFHDSNIRHIILYSNNSPCDEANHCCISKMYNFLMNYPEVTLSVFFSQLYHTENQFPTSAWNREALRGLASLWPQVTLSAISGGIWQSILETFVSGISEGLTAVRPFTAGRTLTDRYNAYEINCITEVKPYFTDALHSWQKENQDQKVWAASENQPLHNTTPAQWQPDMSQDCRTPAVFMLVPYRDLPPIHVNPSPQKPRTVVRHLNTLQLSASKVKALRKSPSGRPVKKEEARKGSTRSQEANETNKSKWKKQTLFIKSNICHLLEREQKKIGILSSWSV

SEQ ID NO: 59 - protein, 363 aa, Macaca fascicularis
  REGION 1..363: note = MISC_FEATURE - mfAPOBEC-4 polypeptide sequence
MEPTYEEYLANHGTIVKPYYWLSFSLDCSNCPYHIRTGEEARVSLTEFCQIFGFPYGTTYPQTKHLTFYELKTSSGSLVQKGHASSCTGNYIHPESMLFEMNGYLDSAIYNNDSIRHIILYCNNSPCNEANHCCISKVYNFLITYPGITLSIYFSQLYHTEMDFPASAWNREALRSLASLWPRVVLSPISGGIWHSVLHSFVSGVSGSHVFQPILTGRALTDRYNAYEINAITGVKPFFTDVLLHTKRNPNTKAQMALESYPLNNAFPGQSFQMTSGIPPDLRAPVVFVLLPLRDLPPMHMGQDPNKPRNIIRHLNMPQMSFQETKDLERLPTRRSVETVEITERFASSKQAEEKTKKKKGKK

SEQ ID NO: 60 - protein, 218 aa, Rattus norvegicus
  REGION 1..218: note = MISC_FEATURE - rAPOBEC-1 (delta 177-186) polypeptide sequence
MSSETGPVAVDPTLRRRIEPHEFEVFFDPRELRKETCLLYEINWGGRHSIWRHTSQNTNKHVEVNFIEKFTTERYFCPNTRCSITWFLSWSPCGECSRAITEFLSRYPHVTLFIYIARLYHHADPRNRQGLRDLISSGVTIQIMTEQESGYCWRNFVNYSPSNEAHWPRYPHLWVRGLPPCLNILRRKQPQLTFFTIALQSCHYQRLPPHILWATGLK

SEQ ID NO: 61 - protein, 218 aa, Rattus norvegicus
  REGION 1..218: note = MISC_FEATURE - rAPOBEC-1 (delta 202-213) polypeptide sequence
MSSETGPVAVDPTLRRRIEPHEFEVFFDPRELRKETCLLYEINWGGRHSIWRHTSQNTNKHVEVNFIEKFTTERYFCPNTRCSITWFLSWSPCGECSRAITEFLSRYPHVTLFIYIARLYHHADPRNRQGLRDLISSGVTIQIMTEQESGYCWRNFVNYSPSNEAHWPRYPHLWVRLYVLELYCIILGLPPCLNILRRKQPQHYQRLPPHILWATGLK

SEQ ID NO: 62 - protein, 198 aa, Mus musculus
  REGION 1..198: note = MISC_FEATURE - mouse cytidine deaminase polypeptide sequence
  REGION 1..30: note = MISC_FEATURE - Nuclear localization sequence
  REGION 183..198: note = MISC_FEATURE - Nuclear export signal
MDSLLMKQKKFLYHFKNVRWAKGRHETYLCYVVKRRDSATSCSLDFGHLRNKSGCHVELLFLRYISDWDLDPGRCYRVTWFTSWSPCYDCARHVAEFLRWNPNLSLRIFTARLYFCEDRKAEPEGLRRLHRAGVQIGIMTFKDYFYCWNTFVENRERTFKAWEGLHENSVRLTRQLRRILLPLYEVDDLRDAFRMLGF

SEQ ID NO: 63 - protein, 224 aa, Petromyzon marinus
  REGION 1..224: note = MISC_FEATURE - pmCDA-1 polypeptide sequence
MAGYECVRVSEKLDFDTFEFQFENLHYATERHRTYVIFDVKPQSAGGRSRRLWGYIINNPNVCHAELILMSMIDRHLESNPGVYAMTWYMSWSPCANCSSKLNPWLKNLLEEQGHTLTMHFSRIYDRDREGDHRGLRGLKHVSNSFRMGVVGRAEVKECLAEYVEASRRTLTWLDTTESMAAKMRRKLFCILVRCAGMRESGIPLHLFTLQTPLLSGRVVWWRV

SEQ ID NO: 64 - protein, 331 aa, Petromyzon marinus
  REGION 1..331: note = MISC_FEATURE - pmCDA-2 polypeptide sequence
MELREVVDCALASCVRHEPLSRVAFLRCFAAPSQKPRGTVILFYVEGAGRGVTGGHAVNYNKQGTSIHAEVLLLSAVRAALLRRRRCEDGEEATRGCTLHCYSTYSPCRDCVEYIQEFGASTGVRVVIHCCRLYELDVNRRRSEAEGVLRSLSRLGRDFRLMGPRDAIALLLGGRLANTADGESGASGNAWVTETNVVEPLVDMTGFGDEDLHAQVQRNKQIREAYANYASAVSLMLGELHVDPDKFPFLAEFLAQTSVEPSGTPRETRGRPRGASSRGPEIGRQRPADFERALGAYGLFLHPRIVSREADREEIKRDLIVVMRKHNYQGP

SEQ ID NO: 65 - protein, 209 aa, Petromyzon marinus
  REGION 1..209: note = MISC_FEATURE - pmCDA-5 polypeptide sequence
MAGDENVRVSEKLDFDTFEFQFENLHYATERHRTYVIFDVKPQSAGGRSRRLWGYIINNPNVCHAELILMSMIDRHLESNPGVYAMTWYMSWSPCANCSSKLNPWLKNLLEEQGHTLMMHFSRIYDRDREGDHRGLRGLKHVSNSFRMGVVGRAEVKECLAEYVEASRRTLTWLDTTESMAAKMRRKLFCILVRCAGMRESGMPLHLFT

SEQ ID NO: 66 - protein, 158 aa, Saccharomyces cerevisiae
  REGION 1..158: note = MISC_FEATURE - yCD polypeptide sequence
MVTGGMASKWDQKGMDIAYEEAALGYKEGGVPIGGCLINNKDGSVLGRGHNMRFQKGSATLHGEISTLENCGRLEGKVYKDTTLYTTLSPCDMCTGAIIMYGIPRCVVGENVNFKSKGEKYLQTRGHEVVVVDDERCKKIMKQFIDERPQDWFEDIGE

SEQ ID NO: 67 - protein, 194 aa, synthetic construct
  REGION 1..194: note = cytidine deaminase polypeptide sequence
MKPQIRDHRPNPMEAMYPHIFYFHFENLEKAYGRNETWLCFTVEIIKQYLPVPWKKGVFRNQVDPETHCHAEKCFLSWFCNNTLSPKKNYQVTWYTSWSPCPECAGEVAEFLAEHSNVKLTIYTARLYYFWDTDYQEGLRSLSEEGASVEIMDYEDFQYCWENFVYDDGEPFKRWKGLKYNFQSLTRRLREILQ

SEQ ID NO: 68 - protein, 192 aa, synthetic construct
  REGION 1..192: note = cytidine deaminase polypeptide sequence
MADSSEKMRGQYISRDTFEKNYKPIDGTKEAHLLCEIKWGKYGKPWLHWCQNQRMNIHAEDYFMNNIFKAKKHPVHCYVTWYLSWSPCADCASKIVKFLEERPYLKLTIYVAQLYYHTEEENRKGLRLLRSKKVIIRVMDISDYNYCWKVFVSNQNGNEDYWPLQFDPWVKENYSRLLDIFWESKCRSPNPW

SEQ ID NO: 69 - protein, 280 aa, synthetic construct
  REGION 1..280: note = cytidine deaminase polypeptide sequence
MDPQRLRQWPGPGPASRGGYGQRPRIRNPEEWFHELSPRTFSFHFRNLRFASGRNRSYICCQVEGKNCFFQGIFQNQVPPDPPCHAELCFLSWFQSWGLSPDEHYYVTWFISWSPCCECAAKVAQFLEENRNVSLSLSAARLYYFWKSESREGLRRLSDLGAQVGIMSFQDFQHCWNNFVHNLGMPFQPWKKLHKNYQRLVTELKQILREEPATYGSPQAQGKVRIGSTAAGLRHSHSHTRSEAHLRPNHSSRQHRILNPPREARARTCVLVDASWICYR

SEQ ID NO: 70 - protein, 555 aa, synthetic construct
  REGION 1..555: note = pYY-BEM3.1; tr|F7B644|F7B644_HORSE polypeptide sequence
MPRGRARERQRRNPMEKLDAEAFSFHFLNMEFVYDRNCSYLCYQVEGRLSGSPVLSEQGVFPNEVCGKTRRHAELCFLDWFRGRLSPDEYYCVTWFISWSPCSNCAREVAEFLKRHRNVELSIFAARLYYCRDHEQGLQSLCNRGAQLAVMLRKDFTYCWDNFVHNSGREFSPWENIDANSDLLARKLEDLLKNPMEKLHRKTFSFHFRNLKFAKGRKCSYLCYRVEGRLSGSPGLSEQGVFLNEVCDENCRHAELCFLHWFRGRLSPHADYRVTWFISWSPCSNCAREVAEFLKQHRNVELHISAARLYYWQRNKPGLRNLRSSGAQLAIMFFWDFRDCWDNFVHNSGRHFIPWKKINVNSRLLATKLEDLLKNPLEKLHPNTFSFHFCNLEFAYDRKYSYLCYQVEGRLSGSPGLSEQGVFLNEVCGKTRCHAELCFLDWFRVRLSPDEYYRVTWFISWSPCFYCAREVADFLKQYRNVKLSIFAARLYYCRDHAQGLRSLCSSGAQLAIMFFWDFRYCWDNFVHNSGREFRPWKKINVNSRLLATKLEDILK

SEQ ID NO: 71 - protein, 437 aa, synthetic construct
  REGION 1..437: note = pYY-BEM3.2; tr|D1LZA1|D1LZA1_PANTI polypeptide sequence
MEPWRPSPRNPMDRIDPKTFRFQFPNLRYASGRKLCYLCFQVERDYFYYNDSDWGVFRNEVHPWAPCHAEQCFLSWFRDQYPYRDEDYNVTWFLSWSPCPTCAEEVVEFLEEYRNLTLSIFTSRLYYFWHPNYQEGLCKLWDAGVQLDIMSCDEFEYCWDNFVYHKGMRFQRRNLLKDYDFLAAKLQEILSPGQQRKRDWPFPPRPGAQVDPRSWVQEVTEPGINTRRHPLHLLVSFLLPRPTMNPLQEDIFYRQFGNQHRVPKPYYYRRKTYLCYQLKLPEGTLIDKDCLRNKKKRHAEICFIDKIKSLTRDTSQRFEIICYITWSPCPFCAEELVAFVKDNPHLSLRIFASRLYVHWRWKYQQGLRHLHASGIPVAVMSLPEFEDCWRNFVDHQDRLFQPWRNLDQYSESIKRRLGKILTPLNDLRNDFRNLKLE

SEQ ID NO: 72 - protein, 440 aa, synthetic construct
  REGION 1..440: note = pYY-BEM3.3; tr|A0A3Q0DM17|A0A3Q0DM17_TARSY polypeptide sequence
MPMKRMYSNIYFDHFNNQRLLSGQNAPWLCFKVERVENCMLVPLETGVFGNQVSGCCGKTERPVEPTSLTRSVLVSPNPGTELRAQQPSRKGHLGKLGCVEYPSPGLALVMLGYGASTYCPDSSMYCPETCHHPEMCFLYWFEKTLSHEEQYQITWYVSWSPCVNCAEEVAEFLSVHPKVNLTIYAARLYCYQKLNHRQGLRRLCKEGACVKIMNYEEFDHCWENFVYNNYKSFKPWVKLQDNYELLATELDKILRIPMERMPQKKFRFHFQNLIAKDRNTTWLCFEVKNVRKKHPPDLLERGIFQNQVTPRINCHAEMCFLSWFLENMLLHGKRYQVTWYISWSPCSICAEEVAEFLSAHPKVSLTIYAARLYYFWVPGYRQGLRRLVEEGARVEIMNYEEFDYCWENFVSINNEPFQPWEGLHEKYGYLVTKLNNILG

SEQ ID NO: 73 - protein, 453 aa, synthetic construct
  REGION 1..453: note = pYY-BEM3.4; tr|A0A3Q0DNJ5|A0A3Q0DNJ5_TARSY polypeptide sequence
MEDNPEPRPRQQMDQDTFIFNFNNDPSVRGRHQTFLCYEVEHLDDDTWVPQDKYLGFLHNQPQSRSNAYCAYHAELCFLELVSSWQLDPAQRYRVTCFISWSPCSSCAQEVAAFLKKNRHVTLRILAARIYDYYQGYEDGLRTLQGVGVDITVMTSAEFGHCWNTFVDHQGSPFQPWEGLDQHSQVIWQRMQDILQVIPAKYLMEKVKYTVTVDILFKGRVPGPRYLMDQNTFTRNFINNLSVSGRRQTLLCYEVERLGGDIWVPLDQLRGFLLSQARDVLNYYQGRHAEPCFLDLVSSWQLDPAQHYRVTWFISWSPCTSCAQAVAAFLRENRHVTLRILAARIYDYHQGYEEGLRTLQRTGAHIDIMTFKEFGHCWNTFVNHKGSPFKSWTGLDQHSQALRKRLQDILHTMASSLWDQSEPKKPIPSQEVTLPESIPPSHGNRFRLVKRPS

SEQ ID NO: 74 - protein, 424 aa, synthetic construct
  REGION 1..424: note = pYY-BEM3.5; tr|G5AYU5|G5AYU5_HETGA polypeptide sequence
FCFLSCVHRKPIERIYKKAFRFYFRNLRCAYGRNKTFLCYEVKRERDNKVLHKGVVLNQVEPYMPLHAELRFLSWFHDTLLCPLGSYQVTLYVSWSPCSECAEELTTFLAGHRNVTMTIYVAQLYYCNWKSPNREGLKILIAEDARLRVMFYDEFLYCWRNFVKNDYNNFDPWSLLDENSRYHNRILQNILKGWGRPHRVGPEGEQTATPGGSGGHCISVFSLLRRREMTLKEETFRVQFNNAYKAPKPYRRRVTYLCYQLQEANGDPLTKGCLRTKKGYHAESRFIKRICSMDLGQDQSYQVTCFLTWSPCPHCAQELVSFKRAHPHLRLQIFTARLFFHWKRSYQEGLQRLCRAQVPVAVMGHPEFAYCWDNFVDHQPGPFEPPWAKLEYYSSCLKRRLQQILRSWGVDDLTNDFRNLQLGP

SEQ ID NO: 75 - protein, 385 aa, synthetic construct
  REGION 1..385: note = pYY-BEM3.6; tr|A0A2Y9QMV5|A0A2Y9QMV5_TRIMA polypeptide sequence
MLSSPQTPGTRKPMKTLAPDEFSFNFENLRLAHGRNTTFLCFQVETKAPPSLNSPDSGIFQNQDHCPSHHHAEMVFLTWFQKRLSPAQHYEVTWYMSWSPCSRCAVQVAKFLKSNSTVNLSIFVARLYYPRELETKDGLHSLWQAGAQVQIMFFQDFKYCWENFVNNEGKPFQPWKNLDENSKDWDTELKDIHRNTTDLLTEEMFYSQFYNREKKSSIPRKTYLCYQLNEPQPVKRCLHYKKGYHAVTRFIDGIVSMNLDPARSYDITCYFTWSPCNRYARKLVSFIEDYPNLRLKVYTSRLYFHWCWTNMQGLQHLQNSRVTVAVMTFRDFEYCWKNFVDNQGKPFEPWEKLDLYSQSTERRLRRILKPLTPDVLNEDFGNLHL

SEQ ID NO: 76 - protein, 381 aa, synthetic construct
  REGION 1..381: note = pYY-BEM3.7; tr|H0XHI0|H0XHI0_OTOGA polypeptide sequence
LSCAFRDPMNRMYPKTFCQNFEKEPCPSNQNSSWLCFEVETKNSAVFFHRGVFRNQPAPPPRAPTSVLLSQGPVKTPCHAEECFLTWIQGVLPPDHHYHVTWYVSRGPCANCANLIVHFLAMHRRVTLTIFAAHLNFFWESDFQQGLLRMDQEGVQLHIMGYEEFEYCWDNFVYNQRKQFVPWNGLNENYEFMVSTLEDILRSPLDRIRQKDFSIHFRNSLWLDDKSTWLCFEVKRTKSPVPLYRGVFRNQSPPKTPCHAEVRFFTWLQDLPPDFCCQFTWYLSWSPCADCADLVANFLAKHRNVSLTIFVARLYYYRDPEMHRGLRRMYQEGANVDIMSVIEFEYCWDNFVYNQGKQFVPWNGLNENYEFLVPRLQEILE

SEQ ID NO: 77 - protein, 337 aa, synthetic construct
  REGION 1..337: note = pYY-BEM3.8; tr|A0A3M0K4Y7|A0A3M0K4Y7_HIRRU polypeptide sequence
MYISKKALRRHFDPRVYPRETYLLCELQWEGSRRVWIHWIRNVPDHHAEEYFLEEVFEPRNYGFCNITLYLSWSPCCTCCSKIRDFLKRNPNVKIDIRVARLIYPDYAETRSSLRELNGLQRVSIQVMEAAGLSCIESKNHRISQVERDPKGSSSPTLFTLQDHLKLSNMTESVIQDSVSIQICYQMRILGFQCHIRWKLQPEDFQRNYSPNQIGRVVYLLYEVRWRRGSIWRNWCSNNPEQHAEVNFLENHFHHRPQTPCSITWFLSTSPCGKCSRRILEFLKSQPNVTLEIYAAKLFRHHDIRNRQGLRNLMMNGVTIYIMNLEGNPASLCLSVD

SEQ ID NO: 78 - protein, 237 aa, synthetic construct
  REGION 1..237: note = pYY-BEM3.9; tr|A0A3P4LUZ8|A0A3P4LUZ8_GULGU polypeptide sequence
MSFEDYEYCWETFVDHKGMYFQSWDLLRDNDLLAAELKNILRSTMNPLRQEIFYHQFGNQPRAPRPYHRRKTYLCYQLQPHEGPITARVCLQNKKKRHAEIRFIDNIRALRLDRSQTFEITCYLTWSPCPTCAKALAVFVQDHPHISLRLFASRLFIHWCWKYQEGLRLLHRSRIPVAVMRLQEFEDCWRNFVDNQDEPFQPWNKLEQYSESITRRLRRILGHPQNNLENDFRNLHI

SEQ ID NO: 79 - protein, 221 aa, synthetic construct
  REGION 1..221: note = pYY-BEM3.10; tr|G5BPM8|G5BPM8_HETGA polypeptide sequence
RRRIEPWQFEASFDPRQLRRETCLLSEVRWGTSPRAWRGCSLNTARHAEVSFMDRLTSEGRLRGPVRCSITWFLSWSPCGACAQAIGEFLRQHPNVSLVIYIARLFWHVDEQNRQGLRDLVTRGVRMQVMSDPEFAHCWRNFVNYSPGQEARWPQVPPVWTWLYSLELHCILLNLPPCLKISRRHHNQLTFFQLILQNCHYQAIPSPVLLASGLIHPFVTW

SEQ ID NO: 80 - protein, 211 aa, synthetic construct
  REGION 1..211: note = pYY-BEM3.11; tr|H2M862|H2M862_ORYLA polypeptide sequence
MITKLDSVLLPKKKFIYHYKNMRWARGRHETYLCFVVKRRVGPESLSFDFGHLRNRNGCHVELLFLRHLSALCPGLWGYGATGQGRVSYSITWFCSWSPCANCSFRLAQFLSQTPNLRLRIFVSRLYFCDLEDSREREGLRMLKKVGVHITVMSYKDYFYCWQTFVARKQSKFKPWDGLHQNSVRLSRKLNRILQPCETEDFRDAFKLLGL

SEQ ID NO: 81 - protein, 353 aa, synthetic construct
  REGION 1..353: note = pYY-BEM3.12; tr|H0Y0C6|H0Y0C6_OTOGA polypeptide sequence
MYLKTFYRHFNNRPYLSRRNDTWLCFEVKTTSSNSPGSFYSGVFRNQGPRYCPWHTELCFLTWVRPIVSHHHFYQITWYMSWSPCANCAWQVATFLATHENVSLTNYTVRIYYFWRQDYRQGLLRMIEEGTQVYVMSSKEFQHCWENFVDHWGTRWVTCWNRLKKNYEFLVTRLSEILSDPKERISPNTFYNQFNNTPVPRGRKDTWLCFEVKEKNSNSPGSFHRGVFQNQVFSGTSSHARRCPPDHHYEVTWYTSWSPCAHCAWHVVNFLTSNPNVSLTIFAARLYYIYRPEIQQGLRRVFQEGAKVHIMSLKEFKYCWAKLVYNSGMRFMPWYQFNFNFLFPNTTLKGDLH

SEQ ID NO: 82 - protein, 189 aa, synthetic construct
  REGION 1..189: note = pYY-BEM3.13; tr|A0A3Q2Z5X6|A0A3Q2Z5X6_HIPCM polypeptide sequence
MDVHFMNFIYHYKNMRWAKGRNETYLCFVVKRRVGPNSLTFDFGHLRNRNGCHVELLFLRYLGRRLSYSITWFCSWSPCANCSAALSQFLSRMPNLRLRIFVARLYFCDMEDSHEREGLRLLQKAGVQVTVMSYKDYYYCWQTFVDRKKSHFKAWEDLHQNSVRLSRKLNRILQPCEMDLRDAFKLLGL

SEQ ID NO: 83 - protein, 190 aa, synthetic construct
  REGION 1..190: note = pYY-BEM3.15; tr|A0A2K6NY90|A0A2K6NY90_RHIRO polypeptide sequence
MNPHIRNPMEAMYPGTFYFHFKNLWEADNRNESWLCFAVEVIKHHSTVSWKRGVFRNQVDPETHCHAEKCFLSWFCDNTLSPKKNYQVTWYTSWSPCPECAREVAKFLARHSNVMLTIYTARLYYSQYPNYQEGLRRLNEEGVPVEIMDYEDFKYCWENFVYNGDELFKPWKGLKYNFLFLDSKLQEILE

SEQ ID NO: 84 - protein, 202 aa, synthetic construct
  REGION 1..202: note = pYY-BEM3.16; tr|Q6ICH2|Q6ICH2_HUMAN polypeptide sequence
MNPQIRNPMERMYRDTFYDNFENEPILYGRSYTWLCYEVKIKRGRSNLLWDTGVFRGPVLPKRQSNHRQEVDPETHCHAERCFLSWFCDDILSPNTNYEVTWYTSWSPCPECAGEVAEFLARHSNVNLTIFTARLCYFWDTDYQEGLCSLSQEGASVKIMGYKDFVSCWKNFVYSDDEPFKPWKGLQTNFRLLKRRLREILQ

SEQ ID NO: 85 - protein, 202 aa, synthetic construct
  REGION 1..202: note = pYY-BEM3.17; tr|G8GPV1|G8GPV1_CERNE polypeptide sequence
MDGSPASRPGHVMDPGTFTSNFNNKPWVSGQRETYLCYKVERSHNDTWVLLNQHRGFLRNQAKNRLHGDYGCHAELCFLGEVPSWRLDPTQTYRVTWFISWSPCFSGGCAEQVRAFLQENTHVRLRIFAARIYDYDFLYQEALRTLRDAGAQVSIMTYEEFKHCWDTFVDHQGRPFQPWDGLDEHSQALSGRLQAILQNQGN

SEQ ID NO: 86 - protein, 181 aa, synthetic construct
  REGION 1..181: note = pYY-BEM3.18; tr|Q1WBT6|Q1WBT6_SYMSY polypeptide sequence
MALLTAKTFRLQFNNKRRVTKPYYPRKALLCYQLTPQNGSTPTRGYFKNKKKRHAEIRFINKIKSMGLDETQCYQVTCYLTWSPCPSCAWELVDFIKAHDHLNLGIFASRLYYHWCRHQQEGLRLLCGSQVPVEVMGFPEFADCWENFVDHEEPLSFNPSEMLEELDKNSRAIKRRLEKIK

SEQ ID NO: 87 - protein, 211 aa, synthetic construct
  REGION 1..211: note = pYY-BEM3.19; tr|A0A3B4CS14|A0A3B4CS14_PYGNA polypeptide sequence
MDNTNRRKFIYHYKNVRWARGRHETYLCFVVKKRNSPDSLSFDFGHLRNRNGCHVELLFLRYIEVLCPGLWGSGVDGVRVSYAVTWFCSWSPCSNCAQRLTNFLSQTPNLRLRIFVARLYFCDEEDSLEREGLRHLQRAGVQITVMTYKDFFYCWQTFVASRERCFKAWEGLRQNSVRLSRKLNRILQVFISTPVISPLITTHLGQSWAGG

SEQ ID NO: 88 - protein, 315 aa, synthetic construct
  REGION 1..315: note = pYY-BEM3.20; tr|A0A087XZI4|A0A087XZI4_POEFO polypeptide sequence
RKVSYSVTWFCSWSPCANCSIRLAQFLHQTPNLRLRIFVSRLYFCDLEDSREREGLRILKKAGVHITVMSYKDYFYCWQTFVAKSQSKFKPWDGLHQNYIRLSRKLNRILQPALDIKKFIYHYKNLRWARGRCETYLCFVVKKKLHLFMFVIVGRNRLFDLNVTMNNKSLYLIPLHLQLLFLRHLGALCPGLWGYGVTGERKVSYSVTWFCSWSPCANCSIRLAQFLHQTPNLRLRIFVSRLYFCDLEDSREREGLRILKKAGVHITVMSYKDYFYCWQTFVAKSQSKFKPWDGLHQNYIRLSRKLNRILQVQFF

SEQ ID NO: 89 - protein, 189 aa, synthetic construct
  REGION 1..189: note = pYY-BEM3.21; tr|A0A341AEK4|A0A341AEK4_9CETA polypeptide sequence
MASDRGPSAGDATSRRRIEPWEFEVSFDPRELCKETRLLYEIKWGRSQHVWRHSGKNTTNHVECNFIEKFTSERPFHRSVSCCITWFLSWSPCWECSKAIREFLNQHPRVTLFIYVARLFQHMDPQNRQGLRDLIHSGVTIQIMGPTEYDYCWRNFVNYPPGKEAHWPRYPPPLMKLYALELHCIILVP

SEQ ID NO: 90 - protein, 180 aa, synthetic construct
  REGION 1..180: note = pYY-BEM3.22; tr|E2D879|E2D879_MUSMI polypeptide sequence
RNLISRETFNFNFENLCYAKGRKNTFLCYEVTRKDCDSPVSLCHGVFKNKGSIHAEICFLYWFHDKVLKVLTPREEFKVTWYMSWSPCFECAEQVVRFLATHHNLNLTIFSSRLYNVSDPDTQQKLCRLVQEGAQVAVMDLSEFKKCWEKFVDNDGQQFRPWKRLRTNFRYQNSKLQEIL

SEQ ID NO: 91 - protein, 221 aa, synthetic construct
  REGION 1..221: note = pYY-BEM3.23; tr|A0A2K5RDN6|A0A2K5RDN6_CEBCA polypeptide sequence
MWEAQSPGLSREWGSVAISPEDPGPLHIGRFLSCAFRHPMNAMYPGIFNFHFRNLRKAYGRNETWLCFTVEGIMNRSTVSWKSGVFRNQVGSDPFCHAEMCFLSWFRHNMLSPKKDYEVTWYASWSPCPECAGQVAEFLARHGNVRLTIFTAHLYYFWNPSFRQGLRRLSQEGASVLIMGYEDFEYCWDNFVYNDGQPFKPWKRLQDNSLSLYITLQEILQ

SEQ ID NO: 92 - protein, 206 aa, synthetic construct
  REGION 1..206: note = pYY-BEM3.24; tr|A0A2K5RDN7|A0A2K5RDN7_CEBCA polypeptide sequence
MEASPASRPRPLMGPRTFTENFTNNPEVFGRHQTYLCYEVKCQGPDGTRDLMTEQRDFLCNQARNLLSGFDGRHAERCFLDRVPSWRLDPAQTYRVTCFISWSPCFSCAREVAEFLQENPHVNLRIFAARIYDCRPRYEEGLQMLQNAGAQVSIMTSEEFRHCWDTFVDHQGHPFQPWEGLDEHSQALSRRLQAILQGNRWMILSL

SEQ ID NO: 93 - protein, 184 aa, synthetic construct
  REGION 1..184: note = pYY-BEM3.25; tr|A0A1C9CJ69|A0A1C9CJ69_CERAL polypeptide sequence
NPMKAMDPHIFYFHFKNLRKAYGRNETWLCFAVEIIKQRSTVPWRTGVFRNQVDPESHCHAERCFLSWFCEDILSPNTDYRVTWYTSWSPCLDCAGEVAEFLARHSNVELAIFAARLYYFWDTHYQQGLRSLSEKGASVEIMGYEDFKYCRENFVCDDGKPFKPWKGLKTNFRFLKRRLQEILE

SEQ ID NO: 94 - protein, 197 aa, synthetic construct
  REGION 1..197: note = pYY-BEM3.26; tr|A0A2R2Z4D2|A0A2R2Z4D2_PTEAL polypeptide sequence
MHLQVWRKVTEAWREGYTLKPWSRNPMERLYHDYFYFHFYNLPTPKHRNGCYICYQVEGTKKHSRMPLLRGVFENQESLDMMLSPGEKYRVTWYISWSPCFACVDEVIKFLREHTNVELIIFAARLYHSDILQYRQGLRKLHDAGVHVAIMSYYEFKHCLNDFVFHQGRSFCPWNDLNKNSKNLSNTLEDILRNQED

SEQ ID NO: 95 - protein, 206 aa, synthetic construct
  REGION 1..206: note = pYY-BEM3.27; tr|B7T161|B7T161_SHEEP polypeptide sequence
MTEGWAGSGLPGRGDCVWTPQTRNTMNLLRETLFKQQFGNQPRVPPPYYRRKTYLCYQLKELDDLMLDKGCFRNKKQRHAEIRFIDKINSLNLNPSQSYKIICYITWSPCPNCASELVDFITRNDHLNLQIFASRLYFHWIKPFCRGLHQLQKAGISVAVMTHTEFEDCWEQFVDNQLRPFQPWDKLEQYSASIRRRLQRILTAPT

SEQ ID NO: 96 - protein, 205 aa, synthetic construct
  REGION 1..205: note = pYY-BEM3.28; tr|A0A2R2X2G4|A0A2R2X2G4_PTEAL polypeptide sequence
MAGLGQACEGCCGQMPEISYPMGRLDPKTFSFEFKNLPYAYGRKSSYLCFQVEREQHSSPVPSDWGVFKNQFCGTEPYHAELCFLNWFRAEKLSPYEHYDVTWFLSWSPCSTCAEEIAIFLSNHKNVRLNIFVSRIYYFWKPAFRQGLQELDHLGVQLDAMSFDEFKYCWENFVDNQGMPFRCWKKVHQNYKSVLRKLNEILRRR

SEQ ID NO: 97 - protein, 309 aa, synthetic construct
  REGION 1..309: note = pYY-BEM3.29; tr|G1Q1M4|G1Q1M4_MYOLU polypeptide sequence
YAELSFLDLFQSWNLDRGRQYRLTWYMSWSPYPDCAQKLVEFLGENSHVTLRIFAADIHSLCSGYEDGLRKLRDARAQLAIMTRDELQYCWVTFVDNQGQPFRPWPNLVEHIKTKKQELKDILGNPMRRMYPKTFNFNFQNLNSYGRKSTFLCFEVETWEDGSVLDYQNGVFQNQLDPGHAELCFIEWFHEKVLFPDEVRCPDAQYHVTWYISWSPCFECAEQVAGFLNEHENVDLSISAARLYLCEDEDEQGLQDLVAAGAKVAMMAPEDFEYCWDNFVYNRGWPFTYWKHVRRNYGRLQEKLDEILW

SEQ ID NO: 98 - protein, 216 aa, synthetic construct
  REGION 1..216: note = pYY-BEM3.30; tr|A0A1S3AN78|A0A1S3AN78_ERIEU polypeptide sequence
RRIEPWEFEDFFDPRQFRPETCLLYEVRWGSSRNAWRSTARNTTRHAEVNFLERFAAERHFDKPVSCSITWFLSWSPCWECSQAIGAFLSQHPQVTLAIHVTRLFHHEDEQNRQGLRDLLARGVTLQVMGDSEYAHCWRTFVNSPPGAEGHYPRYPSDFTRLYALELHCIILGLPPCLEILRRYQNQFTLFRLVPQNCHYQMIPHLNFFVVRHYFF

SEQ ID NO: 99 - protein, 201 aa, synthetic construct
  REGION 1..201: note = pYY-BEM3.32; tr|Q4VUI3|Q4VUI3_XENLA polypeptide sequence
MTMDSMLLKRNKFIYHYKNLRWARGRHETYLCYIVKRRYSSVSCALDFGYLRNRNGCHAEMLFLRYLSIWVGHDPHRNYRVTWFSSWSPCYDCAKRTLEFLKGHPNFSLRIFSARLYFCEERNAEPEGLRKLQKAGVRLSVMSYKDYFYCWNTFVETRESGFEAWDGLHENSVRLARKLRRILQPPYDMEDLREVFVLLGL

SEQ ID NO: 100 - protein, 191 aa, synthetic construct
  REGION 1..191: note = pYY-BEM3.33; tr|E2RL86|E2RL86_CANLF polypeptide sequence
MNPLQEETFYQQFSNQRVPKPTYQRRTYLCYQLKPHEGSVIAKVCLQNQEKRHAEICFIDDIKSRQLDPSQKFEITCYVTWSPCPTCAKKLIAFVNDHPHISLRLFASRLYFHWRQKYKRELRHLQKSGIPLAVMSYLEFKDCWEKFVDHKGRPFQPWNKLKQYSESIGRRLQRILQPLNNLENDFRNLRL

SEQ ID NO: 101 - protein, 226 aa, synthetic construct
  REGION 1..226: note = pYY-BEM3.34; tr|G1LWB0|G1LWB0_AILME polypeptide sequence
SSAAPASIHLLDEDTFTENFRNDDWPSRTYLCYKVEGPDQGSGVPLGQDKGILHNKPAQGPEPSRHAECYLLEQIQSWNLDPKLHYGVTCFLSWSPCAKCAQKMARFLQENSHVSLKLFASRLYTRERWDEDYKEGLRTLKRAGASIAIMTYREFEHCWKTFVLHDQEGSCFQPWPFLHKESQKFSEKLQAILQVGVLLLSLPPPLPSSPLSSPWPFPAPLRASTG

SEQ ID NO: 102 - protein, 238 aa, synthetic construct
  REGION 1..238: note = pYY-BEM3.35; tr|A0A1U7S7K7|A0A1U7S7K7_ALLSI polypeptide sequence
MGEHWQYAGSGEYIPQDQFEENFDPSVLLAETHLLSELTWGGRPYKHWYENTEHCHAEIHFLENFSSKNRSCTITWYLSWSPCAECSARIADFMQENTNVKLNIHVARLYLHDDEHTRQGLRYLMKMKRVTIQVMTIPDYTYCWNTFLEDDGEDESDDYGGYAGVHEDEDESDDDDYLPTHFAPWIMLYSLELSCILQGFAPCLKIIQGNHMSPTFQLHVQDQEQKRLLEPANPWGAD

SEQ ID NO: 103 - protein, 220 aa, synthetic construct
  REGION 1..220: note = pYY-BEM3.36; tr|A0A2R2X2J8|A0A2R2X2J8_PTEVA polypeptide sequence
MPRIGNMNLLSEKTFNYHFGNQLRVKKPQGRRRTYLCYKLKLPNETLVKGYFINKKKNHAEIRFINKIRSLNLDQTQSYKITCYITWSPCSYCAGKLVALVKSCPHLSLQIFTSRLYYHWLWKNQAGLRYLWKINISVLVMKEPEFADCWDNFVNHQSRRFKPWEKLTQYSNSTERRLLRILRINRTDLFLAQSSEQDPGLNDLVDAIKRLFLDAHRPRD

SEQ ID NO: 104 - protein, 198 aa, synthetic construct
  REGION 1..198: note = pYY-BEM3.37; tr|A0A151P6M4|A0A151P6M4_ALLMI polypeptide sequence
MAVEEEKGLLGTSQGWKIELKDFQENYMPSTWPKVTHLLYEIRWGKGSKVWRNWCSNTLTQHAEVNCLENAFGKLQFNPPVPCHITWFLSWSPCCQCCRRILQFLRAHSHITLVIKAAQLFKHMDERNRQGLRDLVQSGVHVQVMDLPDYRYCWRTFVSHPHEGEGDFWPWFFPLWITFYTLELQHILLQQHALSYNL

SEQ ID NO: 105 - protein, 158 aa, synthetic construct
  REGION 1..158: note = pYY-BEM3.38; tr|A0A2K6MNR2|A0A2K6MNR2_RHIBE polypeptide sequence
IWLCFTMEIIKQCSTVSWKRGVFRNQVDPETHCHAERCFLSWFWEDTLSPNTNYQVTWYTSWSPCLDCAGEVAEFLARHSNVKLAIFAARLYYFWDTDYQQGLRSLSEEGTSVEIMGYEDFKYCWENFVYNGDEPFKPWKGLKYNFLFLDSKLQEILE

SEQ ID NO: 106 - protein, 182 aa, synthetic construct
  REGION 1..182: note = pYY-BEM3.40; tr|F1CGT0|F1CGT0_ANOCA polypeptide sequence
KAAILLSNLFFRWQMEPEAFQRNFDPREFPECTLLLYEIHWDNNTSRNWCTNKPGLHAEENFLQIFNEKIDIKQDTPCSITWFLSWSPCYPCSQAIIKFLEAHPNVSLEIKAARLYMHQIDCNKEGLRNLGRNRVSIMNLPDYRHCWTTFVVPRGANEDYWPQDFLPAITNYSRELDSILQD

SEQ ID NO: 107 - protein, 230 aa, synthetic construct
  REGION 1..230: note = pYY-BEM3.41; tr|C7AGG3|C7AGG3_HORSE polypeptide sequence
MDPQAPTQRGGLGQAYQGGDYVQAPGNGNTQHLLSEDVFKKQFGNQRRVTKPYYRRKTYVCYQLKLLRGPTIAKGYFRNKKKRHAEIRFIDKINSLGLDQDQSYEITCYVTWSPCATCACKLIKFTRKFPNLSLRIFVSRLYYHWFRQNQQGLRQLWASSIPVVVMGYQEFADCWENFADNRGNPFQSWEKLTEYSKGIKRRLQKILEPLNLNGLEDAMGNLKLGSVDLG

SEQ ID NO: 108 - protein, 197 aa, synthetic construct
  REGION 1..197: note = pYY-BEM3.42; tr|A0A250YMK7|A0A250YMK7_CASCN polypeptide sequence
MSLLKEDIFLYQFNNQQQVQKPYFRRRTYLCYQLEQPNGSRPQWPAKGCLQNKKGHHAEIRFIKRIHSMGLEQDQDYQITCYITWSPCLACACALAELKNHFPRLTLRIFASRLYFHWIRKFQMGLQHLYKSGVLVAVMSLPEFTDCWEKFVNHRQVFFTPWDKLEEHSRSIQRRLRRILQSWDVDDLTDDFRNLRL

SEQ ID NO: 109 - protein, 189 aa, synthetic construct
  REGION 1..189: note = pYY-BEM3.43; tr|B7T160|B7T160_SHEEP polypeptide sequence
MPWISDHVARLDPETFYFQFHNLLYAYGRNCSYICYRVKTWKHRSPVSFDWGVFHNQVYAGTHCHSERRFLSWFCAKKLRPDECYHITWFMSWSPCMKCAELVAGFLGMYQNVTLSIFTARLYYFQKPQYRKGLLRLSDQGACVDIMSYQEFKYCWKKFVYSQRRPFRPWKKLKRNYQLLAAELEDILG

SEQ ID NO: 110 - protein, 541 aa, synthetic construct
  REGION 1..541: note = pYY-BEM4.1; tr|A0A182D0J1|A0A182D0J1_BLAVI polypeptide sequence
MTNPESPPQAPCDFNEDALLNREPLRGSPIKFVSPVDYPDLVFALAGPVGVDIDYIQQSISDCLKSFDYSTEFIRITEIMQDIKCSKTIDCTDMLKEYQSKIEYANELRRAYRAKDLLAALTISAISKLREQIKERDEATNKSNIQPSRRKLAWVVRQLKTPEEVRLLRAVYGKQFVLVSIYSSPQRREDFLISKIKIKSRGTIDNNTSSEGAQRLIERDSKEDNEYGQNLSGTFCLGDIFVDSNNKESAIVSIDRFLNAFFGSNEISPTRDEYGMYLAKTASLRSCDLSRQVGAAIFSKTGEIISLGSNEVPKAGGGTYWTGDNADSRDIRLGHDPNEINKVEIFAEIISRLLEDKLLSNDLLNKDAASIVTILLSKNEGKRYKDLRVMDIIEFGRIIHAEMSAICDAARNGRAIIGATLFCTTFPCHLCAKHIVASGIGRIVYLEPYPKSYAKKLHSDSIQVEDHSDSEKVSFEPFIGISPSRYRELFEGGRRKDPFGEALKWKNDPRKPVIDVVVPPHFEAEKLVIAQLGKLIVSGTG

SEQ ID NO: 111 - protein, 330 aa, synthetic construct
  REGION 1..330: note = pYY-BEM4.2; tr|A0A2D6EXD2|A0A2D6EXD2_9ARCH polypeptide sequence
MIIGLVGTIGAGKQTIIDYLQEKYGYNALSCSDVLREILKKQGKPVTRDNLREIGNKTREEGGNGAIAKILLEKLRNNWKANYIVDSLRHPDEVSVLRTSPLFHLVAVDADLRIRFERVKARKREEEPTTLPAFVERDQKEMFGTGNEQRIRETMELADELVLNNGTVEELKQRIDDLNLVSDERLRPSWDDYFMRLARLAAQRSNCMSRKVGAIITKDRRVIATGYNGTPRGVKNCNEGGCERCNSAVAKGTAISECLCLHGEENAIIEAGRVRSEGATIYTSFLPCLWCTKMIIQAGLKEVVFSEVYDLHEASIKLFETSGVLIRRLK

SEQ ID NO: 112 - protein, 367 aa, synthetic construct
  REGION 1..367: note = pYY-BEM4.3; tr|F7YVM7|F7YVM7_9THEM polypeptide sequence
MNEFKYMSLALKLAKKGKYTTSPNPMVGAVIVKDGKILATGYHKKAGQPHAEINALSKLNFQAQNCEMYVTLEPCSHYGRTPPCADAIIRSGIRKVVIATLDPNPLVNGKGVEKLKNAGIEVVCGVLEEKAKKLNEKFFKYITTKIPFVALKIAQTLDGKIALKNGESKWITSEKSREYVHKLRMEYDAVLTGIGTILKDDPQLNVRLKKVYKQPLRIILDSKLKIPLSAKVLEDPSKVIILTTALADKEKLEELRSKGVEVIITNEKNGIVDLESALKILGEKKITSVMVEAGPTLLTSFLKESLFDKIYLFIAPKIFGADSKSVFSELGLEDISKSQKFSLESVKKIGEDLLLELYPKQLKKLEE

SEQ ID NO: 113 - protein, 449 aa, synthetic construct
  REGION 1..449: note = pYY-BEM4.4; tr|A0A3M6UNF1|A0A3M6UNF1_9CNID polypeptide sequence
MEEKSELENELMRSTSPKPSVPNGSKGNECEQRETRITKENLYMVLALWMEEFPVVEQTSSAKRLNKVGVVFVLPTDRVLAADCSRDGVHGVARVMVNHCGKLEGCKVFVSRKPCSLCAKLLVQSKVSRVFYLPIEPESENKGEIARADNLFKNSSVGQSVFVPCVEQKVLDKLEDKLPKEIITPDDISECRDNLLKKCGWSAEWFARAQASLPWPCFEGKMKSQVDNDFKSLIKWIAVVKAPMDKGVAFPKVKLTSDSRVVPDCDADNFPDSKTAYHMMIFAKMLARQTDDPKTGVGAVIVRGKVPDIVSLGWNGFPSKALYGEFPRASDDDRALQKKFPYVIHAEQNALMVRNVKDLTDGILFVTKPPCDECAPMIKLSGVKTIVIGEKIEKSRGGELSYNLIKEYIKEGIMTCYQMEATKTKAKRLASDPETRKRLKSSCSNSNDV

SEQ ID NO: 114 - protein, 414 aa, synthetic construct
  REGION 1..414: note = pYY-BEM4.5; tr|A0A2G3K826|A0A2G3K826_9BURK polypeptide sequence
MTKIIDDVNTAAAAVLDQATAAANQTTFAVGGVMVNNQTGEVISAIHNNVIIPLSNNVSFTFDPTAHGERQLVYWYYANKEALKLPEPNQITVITSLDPCAMCTGALLTAGFNVGVVAIDTYAGINCAQNFQFATLPANLRTKAQKNFGYYASGAANFKPLTRSYVGGPSVAFKNGVVTPANLRDCGTVFTQSVDTVRNTSNSTGLAPSQMSNPAELPSNSAILQAYRAIYKKAFTIKIDNPRLPDAQILTELKAVLADAPNARNAVAFIDPFGNLVLCMADAFNTSPVHAAFMNVTQEYAKTRWDLMNKYAQASTTDNPALYLTHPKYGTFVYLYAPDPDDSITIMSLGAYGSTMEGPIPNMFPSNLQFYYPPRNGAQFSELVPVVNELPPFYTQNVNISLMQVPGVTQAPTK

SEQ ID NO: 115 - protein, 308 aa, synthetic construct
  REGION 1..308: note = pYY-BEM4.6; tr|K1ZCJ4|K1ZCJ4_9BACT polypeptide sequence
MSSRAKKNRSTNLKKSIGQKSIENKPTDQKKDQVLVAYVPVIHEGYRRFFRHFPAVKELWLISQELSHELRSLQKDIRALKASETKKLLQTWGQFQKIKLLTPSSLAILQKTTTQLVFPDEEISHHLVEKYFAQNRVLFASFFLRWDKKSSLKKHDLQEYSEISNKEFDQMMIAIAQQEADKSDDWWRQVGGLIFKDETILLLAHNQHTPTEAEAYFAGDPRADFHQGEYLKISTAIHAEAYLIAQAAKQGISLEGADLYVTTFPCPVCAKQVAYSGIKRVFFREGYSLLDGETILKANGVKLIRVTV

SEQ ID NO: 116 - protein, 615 aa, synthetic construct
  REGION 1..615: note = pYY-BEM4.7; tr|A0A1G3PNQ8|A0A1G3PNQ8_9SPIR polypeptide sequence
MRDLPLLVLGLTGPMGAGCTRFARDISKMEPGKVIKKQGLLDQVAHEISELSKKASEIRLQCISNGKNSELAELKRLNRRLNAKLAERACLHVIAKSSLPEPLFISLNTIVIKIAVDSITAPEFAEWAKNHAKVADLLKWLRTQWESELTLYETWGQDAGRFSQDELEKMDAMFAEFERIGDEILKEDFETYFGKRNNDFSIRMFSENIRLSGNPFRPAENGGGGGKYDEPSMVMIARETDRYIRFYRTRSDQKRSHFFIIDEIKNPREAEYFRARHQNFFLVSIFSSSEIRASRMRRGLGHDAGVSDADFQHLFRELDSRDWGADDFDAHGLHRQNIYRCFNLADIAINNDVEDERFSEVLFNKFIRYYALMLSPGCVQPTPQETYMHLAYSLSLRSTCISRQVGAVITDLEDRILSLGWNEVPEGQIGCGLKVKKDYTDKENPLFEMEIWDNVITAEDLAVWDDEDSICVKDILSRIEIKTKLKSVSLTPEERADVLKALRIKRLEYSRSLHAEENAILQVASRGGVGLKDGTIYVTTFPCELCSKKIYQVGISKIYYTEPYPNSISEKVILKDGIRNIKILQFEGVKSYSYFKLFKPGFDKKDAQMLEGRGI

SEQ ID NO: 117 - protein, 291 aa, synthetic construct
  REGION 1..291: note = pYY-BEM4.8; tr|A0A1G0PGF4|A0A1G0PGF4_9BACT polypeptide sequence
MKHNNQLRKEIEKLLGQNSIIKNDELKKLQKEYKIETDELLISFLPYAAEFAKVPISKYKVGAVVLGKSGNIYFGSNMEFEAGALSATVHAEQSAVNNAWLNGETGINKIAVTAAPCGYCRQFLNELTTAKQLHVLLKDKNLEAAKVFKLTELLPEAFGPRDLEIEGGLMKVENHKLKIENINDELINAALEAANKSYAPYSKNYSGVSIQLSDGTIFSGRYSENAAYNPSLLPFQSALAFMNMNTKKGSNNKIVDAVLVEAVSNISQKDAAGTLLNSISKTKLRYYKIKN

SEQ ID NO: 118 - protein, 398 aa, synthetic construct
  REGION 1..398: note = pYY-BEM4.9; tr|A0A0P4WGY5|A0A0P4WGY5_9EUCA polypeptide sequence
MEENSSATSQPKCASRTKQGGNDLSTDMSNLSVGETKRTDFLPWDDYFMAVAFLSAMRSKDPSSQVGACIVNADKKIVGIGYNGMPIGCSDDELPWNKESLDPLQTKYMYVCHAEMNAIMNKNSSDLAGCCVYVALFPCNECAKLVIQAGIREVVFFSDKHQQKPETVASKKMLNMAGVAYRQYTPSQSKIELNLSLKEQEKSEPTADITQSSERDQNSKRKDYLSWEEYFMAMAHLSALRSKDPITQVGACIVNSKKKIVGIGYNGMPLGCNDDLMPWGNSSSNKLETKYMYVCHAGVNAIMNKNSCDVSGCTLYVALFPCNECAKVIIQAGIKTIIYASDTNKDQASILASKKMLDMAGIKYRADNLSQRKIVIDFKTIDWNSRFMNDHQNDPTCL

SEQ ID NO: 119 - protein, 259 aa, synthetic construct
  REGION 1..259: note = pYY-BEM4.10; tr|A0A3D8IG27|A0A3D8IG27_9HELI polypeptide sequence
MRKNILYFILTLFFLSGLYATSLPEDNVVSGVIYEKIDTVSAEVDHIYPMLALAIVYKDWQEKNMLNKQGHNIGLVIVDENNMPVFWVRNSVHATHNGTQHGEVRLVSNLLNCEGFNKYLDKYTLYTTLEPCIMCAGMLSMVQIPKVVYAQKDLSCGNTQEIISTAKYPRYYKAFTVENGYKKDLEECFEQYKICKNDSITDFLVNDSAKEIFRKASNDLQDYKVKFKENRRVIKVAQEFLQNIQTKDNLDVLQCPKNM

SEQ ID NO: 120 - protein, 256 aa, synthetic construct
  REGION 1..256: note = pYY-BEM4.11; tr|A0A351C8C4|A0A351C8C4_9BACT polypeptide sequence
MNELTKQSEHLRNEALRIATRSYVPYTGQQEGVIILLENGDLIPGVRVENASFQLTIPALQNALSTMYALQRTDISMIVSSIPFTDSDLAYTGGMAEIAWEMVGASLLLVAGAHIPEAGTFIDPARGENLLDVSREAALNAFIPESDFPVGSAIQTSDDVVIDGCNVEHSDWSKIICAERNVLSTARSYGLGQITTIYVSCPKEPGGTPCGACRQVIVELAPDATVWMDRGNQEPIAMKATKLLPGHFTGNVLKKQ

SEQ ID NO: 121 - protein, 301 aa, synthetic construct
  REGION 1..301: note = pYY-BEM4.12; tr|A0A1G6V2K7|A0A1G6V2K7_PEPNI polypeptide sequence
MPIVRVNEIGARLPEDWEALETAIWQAYVSREDLPDAGELDLTLVDDATIQELNKTHRQLDKSTDVLSFPMYDDRDDLAADVQAGLPVILGDIMISVPTAERQAQAYGHSFKREMAYLLVHGLLHIAGYDHMSAEEKSAMRRAEEAILADVDVPRDTAPSKTAAVLDEADVQALIDAARAARLQAYAPYSGYAVGAALLAADGRRFCGVNVENASYGATCCAERTALFAAVTAGARDFIALALVTEGDEPAPPCGLCRQALAEFSPDLAIYLAGPTGETYRRTSLAALFPEAFSLSTKESV

SEQ ID NO: 122 - protein, 528 aa, synthetic construct
  REGION 1..528: note = pYY-BEM4.13; tr|F2NP91|F2NP91_MARHT polypeptide sequence
MPVMETHALEARFKEALARLCPEGRLLAAVSGGGDSVALLYLLKAAGRDTIVAHLDHALRPDSAADAAFVEKLAQRLGFPLETEHVDVRALAHRKRINLEAAAREVRYAFLARVARRWKARCILTAHTLDDNAETVLLQILRGAGRGLGIRPLQRRVARPLLEFSRAELRAYLEARGARWLEDPTNRSLELDRNYLRHAVLPRITARFPHALEALARFSQAQQADDWALEALSARHLIPDRRWPVPAYRALPLERAPEALRRRAIRGVLEALGVRPEARLVADVEAALGGRAQTLPGGVVVRRQRGTLFFIPPTVRFPKVQPPAGLEARPPRPGDYLVFPYGRKRLVDFLNERGVPRELKRRWPVGAVGAEVRWVYGLWPEPDEDRYMRRALVLARAAARQGEVPIGAVLVRDGAVLAEAANAVEASRDATAHAELLALRTALRRVGEKVLPGATLYVTLEPCPMCYGAILEARVARVVYGVENLKAGAFTVHGLEPRVALEAGRVEGECAKVLKDFFARLRPGRDGA

SEQ ID NO: 123 - protein, 226 aa, synthetic construct
  REGION 1..226: note = pYY-BEM4.14; tr|A0A316TX77|A0A316TX77_9BACT polypeptide sequence
MINGYTPYSGNQNTCYVKGESGTFYPGVRIENVSYPLTISSVQAAVCSCLANSDNPVEYYTGDHQPELLQVWADEYDMKPGGKLPDSPLKLFDPLVPSIPDIKKELDVLTEKSVTPNSGFPVSALLQTEKGYIRGVNIELSSWALGLCAERVAISRALTAGYTQFKSIHIYAPEADFVSPCGACRQVLLEVMPDADTELYHGDGTLSKHIVSDLLPFGFTSHKLKK

SEQ ID NO: 124 - protein, 321 aa, synthetic construct
  REGION 1..321: note = pYY-BEM4.15; tr|R6VYG3|R6VYG3_9FIRM polypeptide sequence
MIHKGTQTIETKRLILRAFTPDDAEAAFENWMSDPKVTEFLRWKTHADISDSRKIVNEWANGSADPEFYQWAIVPKDVNEPIGTISVVDRNDALGIFHIGYCIGSKWWHKGITSEAFSAVIHFLFEEVGANRIESQHDPENIHSGDVMKKCGLTFEGTLRQADFNNRGIVDACVYSILQSEWQNNTSVWQRLYNAALTVQNDRVVSPFIDAGGVAAALMTKKGNIYTGICIDTASTLGMCAERNAVANMLTNGESRIDKIVAVMPDGKVGAPCGACREYMMQLDRDSGDIEILLDLETEKTVRLKDLIPDWWGAERFGDTE

SEQ ID NO: 125 - protein, 229 aa, synthetic construct
  REGION 1..229: note = pYY-BEM4.16; tr|A0A3C1HZ18|A0A3C1HZ18_9BACI polypeptide sequence
MGDIMENWNELSEPWKRCFLQAWKAYCHGSIPIGAVLVDSEGEIFLEGRNRVHELTAPEGQLCDCRIAHAEMNVLVQVKTSDYEKLSGATIYSTMEPCIQCFGAIILSRIKNISFAAIDDKLAGATTLEDRHGFIKSRNLNIAGPFSHLGEIQIILRTDFLLRIFDSEYADPLIAAHEKDYPIGVALGRHYHRNNRLQVAKKETIPFGELFNEFSFDIKRAREGYTLGK

SEQ ID NO: 126 - protein, 205 aa, synthetic construct
  REGION 1..205: note = pYY-BEM4.17; tr|A0A1M6KV24|A0A1M6KV24_9BACT polypeptide sequence
MEASQQNILLKIEGKGPVAEINFTVTLPEWLVEQVQSGSTVFLTQKEKMRFVLELARKNVAQETGGPFAAAVFSLESGELVSAGVNVVVESRCSSAHAEVVALSLAQKAVDSHDLGAAGLPRMVLVSSAEPCAMCMGAIPWSGVKQVICGARDEDVRSVGFDEGAKPLEWVEDFAERGIEVIRDVLREEATEVLWDYRERGGEIY

SEQ ID NO: 127 - protein, 207 aa, synthetic construct
  REGION 1..207: note = pYY-BEM4.18; tr|A0A2U0T9B4|A0A2U0T9B4_9RHIZ polypeptide sequence
METAELISRLLDVIEKDIAPVTAKGVARGNKLFGAAILKKSDLAVIVAETNNEIENPLWHGEMQAIKRFFELPADQRPATRDCLFLATHEPCSLCLSGITWSGFDNFYYLFSHQDSRDGFAIPYDIQILKSVYAVPEPETGTVSPARDLYNRSNDFWTSHGLQDMIAGLARSNREALLARIDDLNALYAELSERYQRDKGGKGIPLP

SEQ ID NO: 128 - protein, 231 aa, synthetic construct
  REGION 1..231: note = pYY-BEM4.19; tr|A0A2K9PN08|A0A2K9PN08_9FLAO polypeptide sequence
MSDKKESKIKISKTSESIELDEIHSLLSYSIVQKFWENDDRNGRGYNVGVILVDENKNIVDWDINSVNKTENSTQHGEMRLISRYLDKDELYSLKGYTMYPTLEPCAMCAGMMTMTNVYRTVNGQMDYFYSKALERLSIDTRECGGYPPYPRTVISEISPSSISTRLDAEYKQYTNAGNKPIITKFLSTYKAKTIYDDAFNQFINFKCKFPENKTKYENAIKFYNSLPESI

SEQ ID NO: 129 - protein, 330 aa, synthetic construct
  REGION 1..330: note = pYY-BEM4.20; tr|F4PWM7|F4PWM7_CAVFA polypeptide sequence
MRFSLSLLFVILSVLLAGVLACKDPYNPETVDYGQCASATKANYEVRSDSKVLTPADLPADELAVHESRMRHIIDIARVNNKKFVSSIYFPNGTLACIGINTGKPNMIAHGEIVAIQNCTEIHGISMYTNYSIYTTGEPCSMCASAILWSRFKTVVWSTYNSDLYCKICMSNIPIDSSYIFSRAYGLGIEAPVAIGGVVKAEGDAWFGTYCNRPTSIYYIAPKCACQDPAKVSPLKFTQTRTTVWVEGGDKVVTQWNAIISNPSNSTIVDPPIVISPSVVFKGAPWGISAASEPNTYKLSYNKVLFPGQTFSFGYSVYGLEEVAFTALEA

SEQ ID NO: 130 - protein, 193 aa, synthetic construct
  REGION 1..193: note = pYY-BEM4.21; tr|U7QZM1|U7QZM1_PHOTE polypeptide sequence
MNKTRRKLLATLGIMSISMSFIAQAGEKKTQVINNILSKQEITEHEKYMREAIKEAIKNPKHPFGAVIVNRNNGEILSRGVNTGRNNPILHGEIQAINHYITQYGNQGWENVALYTTGEPCSMCMSALVWIGIREVIWATSISVIRNSGIRQIDISAHEIAERASSFYNPITLVGGILANETDKLFLERKRGN

SEQ ID NO: 131 - protein, 319 aa, synthetic construct
  REGION 1..319: note = pYY-BEM4.22; tr|A0A081CH48|A0A081CH48_PSEA2 polypeptide sequence
MASRRHLLATQVTGNHRKLSLWHLRGWLSPYTKLVDAVYFLTTNSFYHSLQTPPVQSITMLLSSIITSLALAAQASAYREGLHPEFQSGLSINSVPATDRDHWMRLANSAIYYPPVSHPCPQAPFGTAIVNTTSNELICAIANRVGSTGDPTQHGEITAIQHCTNVMRKKGLSPQEIIAAWKQLSLYTNAEPCTMCLSAIRWAGFKEVIYGTSVGTISENGRNQIYIPSNLVLEKSYSFGHATLMLGNILTHETDPFFQHQFNESAPCPVGCERTQVGEARVKTCEPVPNWQKLVRLEYSEDSRVGSEPVAHTPLHLEL

SEQ ID NO: 132 - protein, 203 aa, synthetic construct
  REGION 1..203: note = pYY-BEM4.23; tr|A0A3D3HMU1|A0A3D3HMU1_9GAMM polypeptide sequence
MDYSDAILGAITSIRRNSKQPGVNVTDNVTDSSTQYNNDEYWMRRALALAREAGEAGEIPVGAVLVKDNQQVAGGFNQPIRSHDPAAHAEILTLREAGAVLGNYRLIDTTLYVTLEPCMMCAGALVHSRIKRLVFGAAEPKTGAAGSFIDLLTLPRLNHYMEVTGGVLGEECSVLLSDFFRRRRAEKKALKRQNSESGSDSAS

SEQ ID NO: 133 - protein, 270 aa, synthetic construct
  REGION 1..270: note = pYY-BEM4.24; tr|A0A1N5WT13|A0A1N5WT13_9ACTN polypeptide sequence
MLEKIERRLVAAAEAVVRSPSTGDAHTVAAAAMDANGDIYSGVNVFHFTGGPCAELVVIGSAAAANAPPLITIVAVGDGDRGVIAPCGRCRQVMLDLHPDVFVIVPTGDGQLAAKPVRELLPFGYVARTGSTAPRVVYFHPRHYDTISSGLKTATVRFQDSVQTGPAVFVFDDGESIRRLDAVVEKVESRRLDHLTEEDAHHEALPDSDALRDAIKTQYPMLGDGDVVDVATFRLTAISAPDPDPRSSYPPAVSRCNPAGPRADLLVGQS

SEQ ID NO: 134 - protein, 257 aa, synthetic construct
  REGION 1..257: note = pYY-BEM4.25; tr|X0SAC5|X0SAC5_9ZZZZ polypeptide sequence
MTKDGRVIASAHDTEVTDQDSTAHAEINAIRKASKIYRKDLTGCLIISTHEPCPMCTGSIIWSNISKVVYGVSIRDSIKAGRDMINLSCKEIIKKPNAEINIYDGILKKECLKLYNNDTRKLVKKFRKYEWINIEENLLNKRMQWFENNKTMIRKLKGNDLEKAYHLILMKIGIKRSEAPIVKKSESKIIFHSKNYCPSLEACIILDLDTREVCKEIYERPTEELIRRLNSKLRFTRNYDCIRPYSDYCEEIIILEK

SEQ ID NO: 135 - protein, 154 aa, synthetic construct
  REGION 1..154: note = pYY-BEM4.26; tr|A0A3B8IC10|A0A3B8IC10_9BACT polypeptide sequence
MPSHEDFIHQCLELGKEALLQGNPPVGSVIVWQDQVIGRGIENGRSSGDITQHAELLALQEAVATGQRDKLKEAIIYSTHEPCVMCAYPIRQYKIPTVVYSVAVPELGGHTSSWHLLTTEDVPKWGKAPKIITGISAEEVEALNAAFQDSLKKG

SEQ ID NO: 136 - protein, 180 aa, synthetic construct
  REGION 1..180: note = pYY-BEM4.27; tr|A0A2N9P8B9|A0A2N9P8B9_9FLAO polypeptide sequence
MFIFKLISPPVSIEVYQDKIIQKLYICFMENIFTDEYFMKKALQEAETAFQQGEIPVGAVIVIDNRIIARSHNLTEMLNDVTAHAEMQAITASANFLGGKYLKDCTLYVTLEPCQMCAGALYWSQISKIVYGATDEQRGYRAMGAQLHPKTKVISGIMQNECTHLMKDFFKQRRSKSTKD

SEQ ID NO: 137 - protein, 178 aa, synthetic construct
  REGION 1..178: note = pYY-BEM4.28; tr|K1KX30|K1KX30_9BACT polypeptide sequence
MVKNPVNNNELYFGKHSEIPMNEEQKAYMKMAVDLSRSGMESGKGGPFGCVIVKDGKVIGIGSNSVLETNDPTAHAEIVAIRDACRNLGHFQLDGCEVYTSCEPCPMCLGAIYWARPSKVFFANDKRDAAEAGFDDDFIYQELELPYEKRKIPFEQGMQDTAKEVFQEWILKEDKTLY

SEQ ID NO: 138 - protein, 196 aa, synthetic construct
  REGION 1..196: note = pYY-BEM4.29; tr|R4XI84|R4XI84_TAPDE polypeptide sequence
MSSEIEPPSTDVHKHAVAEAADESGAADAFMQIALQQAETALLNKEVPVGCVFVHQPTGTVLATGANQTNASLNGTLHAEFVAIESILRDHPPSIFRESDLYVTVEPCVMCASALRQLQVRKVYFGCGNDRFGGCGSVFSIHSDASKTGDAAYMVESGIFRKEAIMLLRRFYLLQNESAPKPALKSTRVLKEHFDE

SEQ ID NO: 139 - protein, 212 aa, synthetic construct
  REGION 1..212: note = pYY-BEM4.30; tr|A0A239CVF7|A0A239CVF7_9DELT polypeptide sequence
MSPASKKHFPSLFSFLLLTIGLICGTAHAQPQGHTADDTAATLANASLKEHEPFIRRCYQLAIDAGKKGNHPFGALLVHKGKIVLEAENTVLTDNDFTNHAEMNLIAEAARTLSRQIIPEATVYTSCAPCAMCTATLAMAGFTRIVYGVSHDALNKRFGLKGKSVSCPALFKTMGMELEFVGPVLEKEGLRVFDFWPEKDPHAQMLKKQARK

SEQ ID NO: 140 - protein, 320 aa, synthetic construct
  REGION 1..320: note = pYY-BEM4.31; tr|A0A1Q3NME1|A0A1Q3NME1_9BACT polypeptide sequence
MTEFNYDWAKLAFSSKRPLTNLKATFIIAPREISEKRFTQLLKEYLPKGDILLGISKEDYVEGLEGQPQFAMLQQKTLQKLIDKVNDASAHKVYTLRYFQRELPAIIEKLTPPRVVGIHGSWHHSFHTLPIYYLLSEKRIPYQLVAAFSDEDEARAYEVATDKKIVRPTLEGSFDDTTVLQLTDEVAKSSYDYGFQTGAILAEKVNGVYQPVAAGFNKVVPYQTYALLNGASRETNFSPANDMNHYDTIHAEMQILVEAAKQGISLKDKTLFVNLMPCPSCARTLSQTELSEIVYRIDHSGGYAVDLLTKVGKDIRRIVY

SEQ ID NO: 141 - protein, 180 aa, synthetic construct
  REGION 1..180: note = pYY-BEM4.32; tr|A0A2G6N4N7|A0A2G6N4N7_9DELT polypeptide sequence
MKERTVSYSDRHFMAEALEMAESALTQGEFPVGCVIADGTAVVARGHRTGTTAGAVNEIDHAEINALRHLGLAGEHLDRTDLTIYSTMEPCLMCFAAIVLSGINRIVYAYEDVMGGGTGCDLTGLPPLYRDAPLTLVAGVRRRASLNLFRRFFTDPENGYWAGSLLSRYTLNQTKDSHRL

SEQ ID NO: 142 - protein, 156 aa, synthetic construct
  REGION 1..156: note = pYY-BEM4.33; tr|A0A0G0RBB8|A0A0G0RBB8_9BACT polypeptide sequence
MQSVQYNKLTHLQRRALDEAEQVLENSYNPYSHFYVGACLISEDEQLIAGTNFENAAYGSAICAERAAVLRANAMSIRRFRGIAIIARGEDFNTTEVTGPCGSCRQVLYEISQVSGCDLQVILATSKKDKIVITTIRELLPLAFGPLDLGVDIGKY

SEQ ID NO: 143 - protein, 217 aa, synthetic construct
  REGION 1..217: note = pYY-BEM4.34; tr|A0A327L2Q5|A0A327L2Q5_9RHIZ polypeptide sequence
MVTSRDGEDEAMMARCVALSRIAVGKGEYPFGAVVAREGRIVAEAINRTIRDGDVSRHAEVIALARAQKAIGRRELRECSLYSNVEPCAMCSYCIREAWVGRVVYALGSPVMGGVSKWNILRDDGLSGRMPQVFDAAPEVVSGVLVEQAQAAWRDWSPLAWEMITLRGLMTDPSARPECRTRAARPRSLWHHLVALIERPPRPYVDPTSAAEGHADL

SEQ ID NO: 144 - protein, 162 aa, synthetic construct
  REGION 1..162: note = pYY-BEM4.35; tr|S2DR30|S2DR30_9BACT polypeptide sequence
MKMKKKIEITVSLEVIQKSEWSKEDRSLIERAIHAVEHAHAPYSNFMVGTALLLDNGQIFSANNQENVSFPVGICAERAVLSYAMGNFPNNRPVKLAVVAKRRSDSTWATVTPCGLCRQTINEYEVKFGHPIEILMLNPGEEILKASGIDQLLPFRFNDLNS

SEQ ID NO: 145 - protein, 153 aa, synthetic construct
  REGION 1..153: note = pYY-BEM4.36; tr|A0A369QGF1|A0A369QGF1_9BACT polypeptide sequence
MEEHEKWMHWCLNLAQQALQQGDFPVGAVVVQKGKLIGQGVEAGQLKKDITCHAEMEAIRDARQTINTADLQNCILYSTHEPCIMCSYVIRHHKISRVVVGTTVPEVGGSSSAYPLLSAPDISIWVAPPHLVTGVLAEACQALSQAYKQKFKK

SEQ ID NO: 146 - protein, 159 aa, synthetic construct
  REGION 1..159: note = pYY-BEM4.37; tr|A0A1W6X4U4|A0A1W6X4U4_9RHIZ polypeptide sequence
MTNPSRQERWDRRFLELAKVFGTWSKDRSAGTGCVIVGPDRLLRASGYNGFARGIDDEVPERHERPAKYSWTEHAERNAIYNAAKLGISLDGCTAYVNWFPCIDCARAIVQAGIVRLVGLHPDHADQRWGSEFKFATEMLRESGIEIILYDIPELAARK

SEQ ID NO: 147 - protein, 490 aa, synthetic construct
  REGION 1..490: note = pYY-BEM4.38; tr|A0A238BW09|A0A238BW09_9BILA polypeptide sequence
MEEMARKIRTKAKKANSYCNTMTFLISKASIVLLKAECKRIELTVVIFRFLIKMNASEPNNELCDMTVIKSMLKITHVIFDLDGLLIDTEVVFSKVNQCLLSKYNKKFTPHLRGLVTGMPKKAAVTYILEHEKLSAKVDVDEYCKKYDEMAEEMLPKCSLMPGVMKLVRHLKTHSIPMAICTGATKKEFEIKTRYHKELLDLISLRVLSGDDPAVKRGKPAPDPFLVTMDRFKQKPEKAENVLVFEDAANGVCAAIAAGMNVIMVPDLTYMKIPEGLQNKINSFSDNLIISNDLNVALMSLKKELSEEEVHFLNRAFEIAVDAVLNNEVPVGCVFVFEGQEVAFGRNDVNRTKNPTYHAEMVALKMMKQWCMDNGRDLEEIMRRTTLYVTLEPCIMCASALYHLRLKKILYGAANERFGGLVSVGTREKYGAKHFIEIMPNLSVDRAVKLLKEFYEKQNPFCPEEKRKVKKPKKSGNNNDNSDDAVALNV

SEQ ID NO: 148 - protein, 159 aa, synthetic construct
  REGION 1..159: note = pYY-BEM4.39; tr|A0A1J5H6Z0|A0A1J5H6Z0_9BACT polypeptide sequence
MAYQPSEKFMQMAIDKTREGVLSGQTPFGACIVKDGKVVACEHNTVWQDTDITSHGEVHTIRAACKAIGSIDLSGCILYSTCEPCPMCFSAIHWARIDTVVYGAFIADAQDAGFNELTISNEKMKEFGGSPVNFISGFMRDENVALFKLWKEQGANNVY

SEQ ID NO: 149 - protein, 168 aa, synthetic construct
  REGION 1..168: note = pYY-BEM4.40; tr|A0A3C2D945|A0A3C2D945_9BACT polypeptide sequence
MKTTEIRIIVHEYQNIDELTENDQYLLHEARRITEFAYAPYSGFHVGAAILLGNGMIVKGNNQENSAYPSGLCAERVALFYANANYPDSEVKTIAISAAKNGILVNDPIKPCGGCRQTLSEAEVRFGSPIRIILDGQDSILVLHGVESLLPLSFSKKDLASPLAATGR

SEQ ID NO: 150 - protein, 214 aa, synthetic construct
  REGION 1..214: note = pYY-BEM4.41; tr|A0A1I7EYS3|A0A1I7EYS3_9BURK polypeptide sequence
MKFKLDPSRPPDEDDYYLGVALAVRRKANCTGNRVAAVIVKNKRVIATGYNGVPEDMPNCLDGGCLRCSNPGGQFKSGTRYDLCICVHAEQNALLTAARFGISVEGAHLYTTMQPCFGCAKEILQAKIEKVFYLHPWVPTDVDPVMDAAMKAEYAKIIGKLKVKKLDFDDPVATWAVTTMRQAALASDKNPDKKTPPKTAKKKVAKKKSRTSPR

SEQ ID NO: 151 - protein, 155 aa, synthetic construct
  REGION 1..155: note = pYY-BEM4.42; tr|H8GQX8|H8GQX8_METAL polypeptide sequence
MNHEHFMRRAIELARQAPQYPFGAVIVRRDDGQCVGQGFNRSDLNPTYHGEMVAINDCAVRHCAEDWRGFDLYTTAEPCAMCQGAIEWAGIGRVFYGTSIPYLQKLGWWQIDLRAAEVSARAVFRDTLIVGGILETECNALFAAARRGCFGTGSE

SEQ ID NO: 152 - protein, 156 aa, synthetic construct
  REGION 1..156: note = pYY-BEM4.43; tr|A0A0S8HZN3|A0A0S8HZN3_9CHLR polypeptide sequence
MDEHDIRFLRASFDVARNARKNGNHPFGALLVDEHGRIVMEAENTVITAKDCTGHAETNLMREASSKYDSDFLANCTIYTSTEPCPMCAGAIFWSNVRRVVYGLSEESLYEIAGRGSEEVLFLSCREIFERGKKLIEVIGPLLEDEAREVHMGFWR

SEQ ID NO: 153 - protein, 193 aa, synthetic construct
  REGION 1..193: note = pYY-BEM4.44; tr|E3SF31|E3SF31_9CAUD polypeptide sequence
MKPTTVLQIAYLVSQESKCCSWKVGAVIEKNGRIISTGYNGSPAGGVNCCEHAEEQGWLLNKPKPVLIPGHKSECVRFSQVDRFVLAKAHREAHSAWSKNNEIHAELNAILFAARMGSSIEGATMYVTLSPCPDCAKAISQSGIKKLVYCETYDKNIPGWDDILKNAGIEVFNVPKRSLDKLNWENINEFCGE

SEQ ID NO: 154 - protein, 330 aa, synthetic construct
  REGION 1..330: note = pYY-BEM4.45; tr|F8AAC6|F8AAC6_THEID polypeptide sequence
MIRAPWHEYFMLLAKIVALRSGCNSRPSGAVIVKNKRILATGYNGPMPGAWHCTDRGPGYCFRREKGIPDIDKYNFCRATHAEANAIAQAARFGISVEGASLYCTLAPCYVCLKLIASAGIKKVYYEHDYGSRDFERDQFWKEAIKEAGLEKFEQITVSQEVMEQLQEILPYPTSKRRLAPTEFLDEFEDGKKYGVPSIEVLFNKLNYLTRQALKDITFVIEKTTVTEEPEGISFYLSGKMVELSELINTVKKQINADQNFYFLAKHNAIEAKIEILREAENIRLKAFLNECPLESFKRIAESLDYILYQVSNSLSLPTRLELSVNLLRI

SEQ ID NO: 155 - protein, 158 aa, synthetic construct
  REGION 1..158: note = pYY-BEM4.46; tr|A0A2H4ZNK4|A0A2H4ZNK4_9EUKA polypeptide sequence
MKKQLSRKIQEEWMSRLLRNAYDAGTYGEVPIAAVILNESGQCIGWGRNCREKDQNPLGHAEIIALRQASYLKKSWRFNECTMLVTLEPCPMCAGALLQARINHIIYGASDYKRGGFGGVLDLSKNSSAHHKIEITRGVKSIQSCQLLETWFRRRRRV

SEQ ID NO: 156 - protein, 176 aa, synthetic construct
  REGION 1..176: note = pYY-BEM4.47; tr|A0A239N5N1|A0A239N5N1_9PSED polypeptide sequence
MEGRAGIIPFDEGGAAMGPAEEDSPMQHLAYMREALALARANVEAGGRPFGAVLVRDGEVIARAANGTHLDHDPTAHAELLALRAAGRALGSPRLDGCVVYASGHPCPMCLAAMHLSGVSAAYYAYSNADGEPYGLSTAAVYAQMAQPVEWQSLPLQALRPEDEEGLYGFWRERRP

SEQ ID NO: 157 - protein, 199 aa, synthetic construct
  REGION 1..199: note = pYY-BEM4.48; tr|A0A328VTR2|A0A328VTR2_9PSED polypeptide sequence
MHPEHLALLQQAPASTHADDTWARLCCEQALLAVEEGCYAVGALLVDGAGELLCSGRNQVFAPAYASAAHAEMRVLDQLEAEHAQVDRRSLTLYVSLEPCLMCYGRILLAGITRVRYLARDRDGGFALRHGRLPPAWANLASGLSVVQAKADPYWLDLAEHAIGRLQDRQTLRQRVIRAWRGQRTLTDEFSSTKRTHSG

SEQ ID NO: 158 - protein, 402 aa, synthetic construct
  REGION 1..402: note = pYY-BEM4.49; tr|A0A103YG48|A0A103YG48_CYNCS polypeptide sequence
YIRELHASSLRRDEHEIQNPKILVIVDRLSSPSLHVSLSLSLSLVIFPPFIPLNQTPTHMENAKVVEAKDGTIAVASAFSGHQEVVQDRDHKFLTRAVEEAYKGVECGDGGPFGAVVVHKDEVVASCHNMVLKHTDPTAHAEVTAIREACKKLNKIELSDCEIYASCEPCPMCFGAIHLSRIKRLIYGAKAEAAIAIGFDDFIADALRGTGFYQKAHLEIKQADGNGAMIAEQVFEKTKAKFAIDHKFLTRAVEEAYKGVECGDGRPFGALVVHKDEVVVSCHNMVLNYTDPTAHAEITAIREACKKLNRIELSDCEMYSSCEPCPMCFGAIQISRIKRLVYGAKAEASIASGIPIGDFISDALKGTGFHEKANFEIKQADGNGAMIAEQVFERTKAMFPKR

SEQ ID NO: 159 - protein, 195 aa, synthetic construct
  REGION 1..195: note = pYY-BEM4.50; tr|W5M1M8|W5M1M8_LEPOC polypeptide sequence
NSSTRESRVMAQMEINGGASPPKKPGKGQSAADQDMITGLINKALQAKEFAYCPYSNFRVGAALMTNDGRVFTGCNVENACYNLGVCAERTAILKAVSEGYESFRAIAVSSDLQDQFISPCGACRQVMREFGTGWDVFLTKVDGSYVRMTVDELLPMSFGPDDLKKKKVFSLQNGHEVSTQFYTHSPCEAGENNN

SEQ ID NO: 160 - protein, 134 aa, synthetic construct
  REGION 1..134: note = pYY-BEM4.51; tr|A0A3N5YPZ2|A0A3N5YPZ2_9ALTE polypeptide sequence
MSNSETEHIQALVDAAQAAQKQSYSPYSSFQVGAAIFADDGNTYSGCNIENVAYPLGQCAEATAIGMMIMQGAKRIEDIMIASPNDQVCPPCGGCRQKISEFGTAETKIHMVTRSGEVSTVTLGELLPLAFDSL

SEQ ID NO: 161 - protein, 162 aa, synthetic construct
  REGION 1..162: note = pYY-BEM4.52; tr|A0A2A9NC86|A0A2A9NC86_9AGAR polypeptide sequence
MTNSTLSNEDRTRLIQGAFQARKKTYSPYSNFPVGAALLTTDGRIIEGANIENASYGGTICAERTAIVKAVSDGYRHFAGIAVTTKMPTRVSPCGICRQVLREFCSLDMPVLLVPGDYPQRNPVDDDGADKPGVITEGGVRETTLGALLPDSFGPENLPPRA

SEQ ID NO: 162 - protein, 163 aa, synthetic construct
  REGION 1..163: note = pYY-BEM4.53; tr|A0A2D6RD43|A0A2D6RD43_9GAMM polypeptide sequence
MNIENLITENDETLIRRCIELAGESVKNGDKPFGALLAKDGNIIFESSNNAKTKVPYHAEILTLMDAQDKLNTTDLSDYALYSNCEPCPMCSFMIREYKLDKVVFSVHSPYMGGQSRWNILEDDVLTRFKPYFSKPPNVVGGVLESEGKRIFDKVGLWMFGKE

SEQ ID NO: 163 - protein, 204 aa, synthetic construct
  REGION 1..204: note = pYY-BEM4.54; tr|A0A0H3AVL6|A0A0H3AVL6_BRUO2 polypeptide sequence
MHAKGYSQQERRIIPFANRFRFRELCSNKSLHGLRAKFPEQYTKWDPMRKAASITKANSATPMDIALEEAHAAGERGEVPIGAVIVRDGEIIARAGNRTREFNDVTAHAEILTIRQAGEMLGSERLIDCDLYVTLEPCAMCAAAISFARIRRLYYGASDPKGGGIEHGGRFYTQPTCHHAPEIYPGFCEADARKILKDFFREKR

SEQ ID NO: 164 - protein, 165 aa, synthetic construct
  REGION 1..165: note = pYY-BEM4.55; tr|A0A242H531|A0A242H531_9ENTE polypeptide sequence
MFIVKNNIEVIQQQAELDAKFMKQALKLAKDASNNGNEPFGAVLVKNDKVILTGENQIHTESDPTYHAELGIIRDFCTSQKITDLSEYTLYTSCEPCCMCAGAMVWSNLDRMVYGLGHDELAEIAGFNIMIGSEEIFSKSPNRPEVAKGVLKEAAVPVYVDYFQR

SEQ ID NO: 165 - protein, 181 aa, synthetic construct
  REGION 1..181: note = pYY-BEM4.56; tr|A0A2R6XZE2|A0A2R6XZE2_9BACL polypeptide sequence
MSGRISWHEYFMAQAKLIALRATCTRLMVGAVIVRDRRVIAGGYNGSIAGDEHCIDVGCKVRDGHCIRTIHAEQNALMQCAKFGVSTDGAELYVTHFPCLNCTKLLIQAGIRHIYYEVPYRVDPYAIELLEKAGVGTTQITVDLNAYVQVMSKVSTDPALTYVPESKAQKDEYGQSVGKIV

SEQ ID NO: 166 - protein, 173 aa, synthetic construct
  REGION 1..173: note = pYY-BEM4.57; tr|A0A139SHT6|A0A139SHT6_9BACT polypeptide sequence
MSEANASSESLPSRNSPVELIAEAAGKFGRRPTWDEYFMATAVLISTRSSCERLNVGCVIVTAGESHKNRIVAAGYNGHLPGSPHTSRMRDGHEQATVHAEQNAISDAARRGSSVEGCTAYVTHYPCINCAKILASAGIAKICYRLDYHNDPLVKPMLAEAGIEIVQLGEAAS

SEQ ID NO: 167 - protein, 170 aa, synthetic construct
  REGION 1..170: note = pYY-BEM4.58; tr|A0A261DBH2|A0A261DBH2_9RICK polypeptide sequence
MVMKKKLITVKRSTEFNNFFMEEALKQAQFALDKNEIPVGAIIVNRITNKVIAKAHNIVEQTKNPVLHAEIVAINQSCQILSSKNLSDCDMYVTLEPCVMCSGAISFARIGRLFYAANDPKQGAIENGGRFFNSKSCFYRPEIYSGFSAKISENLIKEFFYNVRYQKCNP

SEQ ID NO: 168 - protein, 146 aa, synthetic construct
  REGION 1..146: note = pYY-BEM4.59; tr|A0A2N0XZK6|A0A2N0XZK6_9VIBR polypeptide sequence
MTDNSLHESYMRQAFELSKSALPGCRPNPPVGCVFVKDGEVVSSGFSQPPGNHHAEAGAIAAYTGSYDGLVAYVTLEPCSFQGRTPSCAKALVRVRPEKVYVAILDPDTRNSGAGIKILEDAGIDVEVGLLGEEVASFLNPYLIRN

SEQ ID NO: 169 - protein, 159 aa, synthetic construct
  REGION 1..159: note = pYY-BEM4.60; tr|A0A1V5R0F9|A0A1V5R0F9_9BACT polypeptide sequence
MTKKETTKLHALDDFCMKKALLLAKRAFRADEVPVGALVVDSSNKVIGRGYNQVEKRKSQRAHAEQLAIEQACKKIGDWRLEGCTLYVTLEPCTMCMGLIKLSRIERVVFGAASPLFGYQLDKNRKSQLYKKGVIKIRKGVGKATAAALLKDFFKNKRM

SEQ ID NO: 170 - protein, 167 aa, synthetic construct
  REGION 1..167: note = pYY-BEM4.61; tr|A0A2W0H8Y3|A0A2W0H8Y3_9BACI polypeptide sequence
MKNNGRLDHEYFMTEALQEAKEAGQRGDLPIGAVIVHNGRIIARGSNMRKTAGIKISHAENNAMHNCAPYLMKHASECVIYTTLEPCIMCLTTLVMANIDSIVFAADDKYMNMKPFIDANSYIRDRIHQYKGGVCRGESEALLRKYSPYAAELALNGTHPHHRKGGA

SEQ ID NO: 171 - protein, 165 aa, synthetic construct
  REGION 1..165: note = pYY-BEM4.62; tr|A0A261BDB7|A0A261BDB7_CAERE polypeptide sequence
LYKLYIFRMTTTKANLTQFEQELVDKAVGAMEKAYCKYSGFKVGAALVCEDGEIIIGANHENASYGATICAERSAMVTALTKGHRKFKLLAVATELEAPCSPCGICRQYLIEFGDYKVILGSSTSDQIIETTTYGLLPYAFTPKSLDDHEKEAEERNHQEGEKKH

SEQ ID NO: 172 - protein, 162 aa, synthetic construct
  REGION 1..162: note = pYY-BEM4.63; tr|A0A2E1PHI6|A0A2E1PHI6_9GAMM polypeptide sequence
MKELLIHSWLMLNSNSKLIMERVIELSEINLKNGKIPIAAVIVDKKNYEIISESQNEDSPIGHAELLAITKALKKLNTNRLDSTNLFVTIEPCPMCAYAISKCHINRLYFGSEDEKGGGVINGPRIFESHNLKKIDYVSHCYHEKTTQLMQSFFQLKRNQQL

SEQ ID NO: 173 - protein, 133 aa, synthetic construct
  REGION 1..133: note = pYY-BEM4.64; tr|A0A378LUA7|A0A378LUA7_9GAMM polypeptide sequence
MDTIIKKMISNAHNTLAHSYSPYSKFSVASCICTDKDNFYTGVNVENSAYGLAICAETSAISAMVTAGEKRIKSMVVMAGTNILCSPCGACRQRIYEFSTPDTLIHLCDKNSILRTFKINELLPEAFKFDFNP

SEQ ID NO: 174 - protein, 370 aa, synthetic construct
  REGION 1..370: note = pYY-BEM4.65; tr|A0A139HQ78|A0A139HQ78_9PEZI polypeptide sequence
MADSLKSKPGHARHDTALIHGLSQSDVQKLSESCVDAKSKAYCPYSHFRVGCAVLLANGDVVQGANVENAAYPVGTCAERVALGTAVGAKKGDFRALAVSTDISPPASPCGMCRQFIREFCELNTPILMYDKDGKSVVMTLEQLLPMSFGPDKLLPPGQLENGLMQTQTQSSFVTRAFSTTSSRRQDDTPQVPQSHYDFFPQTFPQGPPPKTSFSPDLKQLRKEFLQLQAKAHPDLAPQDQKRRAEALSMRINEAYKTLQSPLRRAQYLLSQQGIDVEDETAKLDDSSLLMEVMEAREAVEEVEDEEQLNEIRAENNGRIEESVRVLEDAFRDNEFEKAAQEAIRLRYWVNIEESIQGWEKGNGGGILHH

SEQ ID NO: 175 - protein, 165 aa, synthetic construct
  REGION 1..165: note = pYY-BEM4.66; tr|A0A2A9FXV0|A0A2A9FXV0_9VIBR polypeptide sequence
MCNLKENKDMDKYFHFACDATIEGMREGTGGPFGATLTRNGEVVCSVANTVLKDMDISGHAEMVAVREACKKLDTLDLSDCVMYATCEPCPMCVSVMLWAGIKTCYYASTHLDAAKHGFSDQQLRDYLDGSDTSTLNMVHIEDNRDDCAKIWTEFRHLNETKNDG

SEQ ID NO: 176 - protein, 509 aa, synthetic construct
  REGION 1..509: note = pYY-BEM4.67; tr|A0A1A8AG96|A0A1A8AG96_NOTFU polypeptide sequence
MEHSDRWSRAEPGLSTSSRETRDGSTQTDCKLQGHGPRLSKVNLFTLLSLWMELFPQEQDEENGQSQIRRSGLVVVREGKVVGLHCSGADLHAGQAAILQHGASLANCQLFFSRRPCATCLKMIINAGVRQITFWPGDPEISMLTSNQTHSQRTSQSITEASLDATAVEKLKSNSRPQICVLMQPLAPGVLQFVDETSRRSDFMERMMDDDPELDSEKLFNSDRLRHLKDFCRHFLIQTDQRHKDILSQMGLKNFCVEPYFSNLRSNMTELVEVLAAVAAGMPQQHYGFYREESLSLDPHPVDVSQAVARHCIVQARLLSYRTEDPKVGVGAVIWAKGQSACCCGTGRLYLIGCGYNAYPAGSKYAEYPQMDNKQEDRERRKYRYIVHAEQNALTFRTRDIKPDECSMLFVTKCPCDECIPLIRGAGVKHIYTSDQDRDKDKGDISYLRFGSLKGVCKFIWQRSPPVSSASSLHLTNGCVGKHVRQAEQQIYKNKKLCTKGSSGSSDIC

SEQ ID NO: 177 - protein, 148 aa, synthetic construct
  REGION 1..148: note = pYY-BEM4.68; tr|A0A3E2VN88|A0A3E2VN88_9FIRM polypeptide sequence
MEKEITNMDKQKLIQMAVDGLGRSYAPYSHFHVSAALLCADGTVYTGNNIENAAYTPSVCAERCAIFKAVGDGRREFEAIAVCGGPDGVIEDYCPPCGVCRQVMREFCDPSSFRVLVAKTAEDYREYTLEQLLPDGFGPDHLTGSGER

SEQ ID NO: 178 - protein, 221 aa, synthetic construct
  REGION 1..221: note = pYY-BEM4.69; tr|A0A2D5ZRJ2|A0A2D5ZRJ2_9BACT polypeptide sequence
MARPVHLHTGERRTEEGATESRAVAAVATAITRAPRAPPRPATGRERDGPPPRRVFGGGLRVGDPSGYDRGESKPIGGPLTEKRSDWHSYFMRIAGEVATRATCDRKHVGAVIVRNRTILSTGYNGSIRGMPHCDDVGHDMVDGHCIATIHAEANAILQAARNGVMIQDGSIYITASPCWNCFKLVANAGLKRVYYGEFYRDKRSFEVARRLGIDLMHIEV

SEQ ID NO: 179 - protein, 155 aa, synthetic construct
  REGION 1..155: note = pYY-BEM4.70; tr|A0A1B8WPS3|A0A1B8WPS3_9BACI polypeptide sequence
MEGVQLIYQFQWGNLIMTVNKEDLYLIDVARNTIKTLYVDGKHHVGAAVRTKTGKIYSAVHLEANIGRVSVCAEAIALGKAISEGESEFDTIVAVRHPDPTQENQKIEVVSPCGICRELISDYGKGTNVILKNKEGYIKTVISDLLPNKYIREDN

SEQ ID NO: 180 - protein, 156 aa, synthetic construct
  REGION 1..156: note = pYY-BEM4.71; tr|A0A1W5ZQK9|A0A1W5ZQK9_9BACI polypeptide sequence
MNRFMERAVSLAAENVRVGGQPFGAVLVKDDELVAEGVNEMHLNYDVSGHAELLAIRRAQGELQTHDLSGYTMYASGEPCPMCLSAMYFAGIKDVFYCATVEEAAQVGLEKSKNVYDDLQKSKGERSLVMKQMPLEDDQEDPMKLWDERTNHNGTS

SEQ ID NO: 181 - protein, 340 aa, synthetic construct
  REGION 1..340: note = pYY-BEM4.72; tr|A0A378V0W4|A0A378V0W4_MYCFO polypeptide sequence
MVHAQFDPTARQALAATAVEAKTRKDLTWQQIADAAELSPAFVTAAVLGQHALPARSAEAVAALLGLDDDAALLLQTIPIRGSIPGGIPTDPTIYRFYEMLQVYGTTLKALVHEQFGDGIISAINFKLDVRKVADPEGGERAVITLDGKYLPPNPFDRVRYRGGLMDFAQRTIDIARQNVAEGGRPFATVIVKNGEILAESPNLVAQTHDPTAHAEILAIRKACTRIGTEHLIGATIYVLAQPCPMCLGSLYYCSPDEVVFLTTRDAYEPHYVDDRKYFELNMFYDEFAKPWDQRRLPMRYEPRDAAVDVYKLWQERNGGERRVPGAPTSTRPGKNPRGE

SEQ ID NO: 182 - protein, 157 aa, synthetic construct
  REGION 1..157: note = pYY-BEM4.73; tr|I3XF03|I3XF03_RHIFR polypeptide sequence
MKQRCMSPKSAQRFWDNDMHNNKDRPMSENELFVAAREAMAKAHAPYSKFPVGAAIRAEDGQIYTGANIENLSFPEGWCAETTAISHMVMAGQRKIMEVAVIAEKLALCPPCGGCRQRLAEFSGASTRIYLCDETGIKKSLALSDLLPHSFETEILG

SEQ ID NO: 183 - protein, 595 aa, synthetic construct
  REGION 1..595: note = pYY-BEM4.74; tr|F8IEF3|F8IEF3_ALIAT polypeptide sequence
MDAKELETRGWLCMRAVDVIDKKRRGEALAEEELRFLIEGYVAGRIPDYQMSAFLMAVVWRGMTREETLVLTRLLADSGERLDLSGIPGVKVDKHSTGGVGDKATLVVLPLVASIGVPVIKMSGRGLGHTGGTIDKLESIPGFRTDLSVAELVAQVRQVGIALGGQTADLAPADKKLYALRDVTGTVESLPLIASSVMSKKLAGGADAIVLDVKVGDGAFMKSRSDARRLARLMVEIGEAAGRRTVAVLSNMDQPLGCAIGNALEVAEAIRVLSGEGPFDLAEIALALAEEMTVLAGVAATREEARRMLRQSVAEGRALETLRRWIAAQGGDPAVVDDPSRLPQAPVQMPYLPKKAGFVAKLSALAFGLAAMRLGAGRETKEEAIDPSVGIVLHAKVGDRVQTHRPMFTVHARTGEDALRCIQELEAAIQISDDPVEAPPLILARIDRSEALPYADLMDAAREARDRAYVPYSGFAVGAALELADGRMVTGANVENASYGLTNCAERSAVFRAVAEGGPGTKPEIRAVAVIADSPEPVSPCGACRQVLAEFCSPDTPVYLGNLQGDVRETTVGALLPGAFTDAQMANVRRQDKEA

SEQ ID NO: 184 - protein, 153 aa, synthetic construct
  REGION 1..153: note = pYY-BEM4.75; tr|A0A1G3M638|A0A1G3M638_9SPIR polypeptide sequence
MKTTNINALDKWDLRFLQMAEHVAEWSKDPSTKVGAVIVRPDRTIASVGFNGFARGVRDTVERLWNRELKYPLTVHAELNAILSAHEPVRGHSLYVSPLSPCSNCAGVIIQSGIARVVAKCGQVNNPAQWSESFNLALTAFAEAGVSVILVEH

SEQ ID NO: 185 - protein, 177 aa, synthetic construct
  REGION 1..177: note = pYY-BEM4.76; tr|A0A3D9LFR2|A0A3D9LFR2_9MICC polypeptide sequence
MEQNDHGSSGAFSDPFEDDIPLTASLPRITGTGSGIDWQRLESTARAAMTRAYVPYSRFPVGAAALVEDGRVVAGCNIENASLGLTLCAECSLVSNLQMSGGGRIVAFYCVDGNGEVLMPCGRCRQLLYEFHAPGMRLMGPDGELTMDEVLPLAFGPADMTHLSDSAASTDDPGRTR

SEQ ID NO: 186 - protein, 172 aa, synthetic construct
  REGION 1..172: note = pYY-BEM4.77; tr|A0A3B9YGB5|A0A3B9YGB5_9BACT polypeptide sequence
MAKPISKKYRKLIETAKAARKKAYSPYSRYQVGAAVLTESGRIYSGANMENASYGLCMCAERVAIANAVTRGEKVLQAVCVVGKKARPCGACRQVMLEFSTKETELLMVDIDPNARRDTVIRTRVYSMLPNPFDPFESGMLPQHPQNLLRRRKSPQPRRKRRSRPVHREVSR

SEQ ID NO: 187 - protein, 391 aa, synthetic construct
  REGION 1..391: note = pYY-BEM4.78; tr|A0A182F569|A0A182F569_ANOAL polypeptide sequence
MPRPSQFRVSSSQSLSNSQIQASQSSDSVVDITSYVNAVVKALLNLSCTKTIIKRADLVNIALKGNGRLIGRVLQDANIELKEIYGYELIEVEKSKTMILCSTLAAGSMDELNDANRRRYTFLYLILGYIFMKNGSVPETIVWEFLETLGIEEQQEHNYFGDVRKLYDSLFKQAYLTRTKQALEGLNDDVMLISWGVRSKHEVSKKDILAGFCKVMNRDPVDFKAQYIEANEKDDKMNNNINGTVDGRNTVEYSSLDASVKELIEAAIKVRNNAYCPYSNFAVGAALRTVGGDIVTGCNVENGTFGPSVCAERTAVCKAVSEGHREFTAVAVVAFQETEFTAPCGTCRQTLSEFSRKDIPIYLVKPSPVRVMVTSLFQLLPHAFSPSFLNK

SEQ ID NO: 188 - protein, 151 aa, synthetic construct
  REGION 1..151: note = pYY-BEM4.79; tr|A0A264Z0D4|A0A264Z0D4_9BACI polypeptide sequence
MEPKKLIEEAIVASKQAYVQYSNFHVGAALLTKDGKLYHGCNIENASYGLTNCAERTAIFKAVSEGEKEFQAIAVVGDTEGPISPCGACRQVLAEFFSPDTVVILANLKGDHVVTNINELLPGFFSSKDLQKKVKNCFEKNALGSSCLRPI

SEQ ID NO: 189 - protein, 229 aa, synthetic construct
  REGION 1..229: note = pYY-BEM4.80; tr|A0A1L9Q1R3|A0A1L9Q1R3_ASPVE polypeptide sequence
MPLSAEEAALVETATATINSIPLSEDYSVASAAKASDGRVFTGVNVYHFTGGPCAELVVLGVAAAAGAAQLTHIVAVANEQRGILSPCGRCRQVLLDLQPNIQVIVGKEGSEQSVPVAQLLPFSYRQPDQHTPVIFKALTSSGPVVVDFFATWCGPCKAVAPVVGKLSETYTDVRFIQVDVDKARSISQEHDIRAMPTFVLYKDGKLLDKRVVGGNMKELEEQIKAIIA

SEQ ID NO: 190 - protein, 18 aa, synthetic construct
  REGION 1..18: note = synthetic peptide
KRTADGSEFESPKKKRKV

SEQ ID NO: 191 - protein, 16 aa, synthetic construct
  REGION 1..16: note = synthetic peptide
KRPAATKKAGQAKKKK

SEQ ID NO: 192 - protein, 17 aa, synthetic construct
  REGION 1..17: note = synthetic peptide
KKTELQTTNAENKTKKL

SEQ ID NO: 193 - protein, 19 aa, synthetic construct
  REGION 1..19: note = synthetic peptide
KRGINDRNFWRGENGRKTR

SEQ ID NO: 194 - protein, 16 aa, synthetic construct
  REGION 1..16: note = synthetic peptide
RKSGKIAAIVVKRPRK

SEQ ID NO: 195 - protein, 7 aa, synthetic construct
  REGION 1..7: note = synthetic peptide
PKKKRKV

SEQ ID NO: 196 - protein, 30 aa, synthetic construct
  REGION 1..30: note = synthetic polypeptide
MDSLLMNRRKFLYQFKNVRWAKGRRETYLC

SEQ ID NO: 197 - protein, 1368 aa, Streptococcus pyogenes [sequence omitted]

SEQ ID NO: 198 - DNA, 4104 bp, Streptococcus pyogenes
  misc_feature 1..4104: note = wild type spCas9 polynucleotide sequence
  source 1..4104: mol_type = genomic DNA
atggataagaaatactcaataggcttagatatcggcacaaatagcgtcggatgggcggtgatcactgatgattataaggttccgtctaaaaagttcaaggttctgggaaatacagaccgccacagtatcaaaaaaaatcttataggggctcttttatttggcagtggagagacagcggaagcgactcgtctcaaacggacagctcgtagaaggtatacacgtcggaagaatcgtatttgttatctacaggagattttttcaaatgagatggcgaaagtagatgatagtttctttcatcgacttgaagagtcttttttggtggaagaagacaagaagcatgaacgtcatcctatttttggaaatatagtagatgaagttgcttatcatgagaaatatccaactatctatcatctgcgaaaaaaattggcagattctactgataaagcggatttgcgcttaatctatttggccttagcgcatatgattaagtttcgtggtcattttttgattgagggagatttaaatcctgataatagtgatgtggacaaactatttatccagttggtacaaatctacaatcaattatttgaagaaaaccctattaacgcaagtagagtagatgctaaagcgattctttctgcacgattgagtaaatcaagacgattagaaaatctcattgctcagctccccggtgagaagagaaatggcttgtttgggaatctcattgctttgtcattgggattgacccctaattttaaatcaaattttgatttggcagaagatgctaaattacagctttcaaaagatacttacgatgatgatttagataatttattggcgcaaattggagatcaatatgctgatttgtttttggcagctaagaatttatcagatgctattttactttcagatatcctaagagtaaatagtgaaataactaaggctcccctatcagcttcaatgattaagcgctacgatgaacatcatcaagacttgactcttttaaaagctttagttcgacaacaacttccagaaaagtataaagaaatcttttttgatcaatcaaaaaacggatatgcaggttatattgatgggggagctagccaagaagaattttataaatttatcaaaccaattttagaaaaaatggatggtactgaggaattattggtgaaactaaatcgtgaagatttgctgcgcaagcaacggacctttgacaacggctctattccccatcaaattcacttgggtgagctgcatgctattttgagaagacaagaagacttttatccatttttaaaagacaatcgtgagaagattgaaaaaatcttgacttttcgaattccttattatgttggtccattggcgcgtggcaatagtcgttttgcatggatgactcggaagtctgaagaaacaattaccccatggaattttgaagaagttgtcgataaaggtgcttcagctcaatcatttattgaacgcatgacaaactttgataaaaatcttccaaatgaaaaagtactaccaaaacatagtttgctttatgagtattttacggtttataacgaattgacaaaggtcaaatatgttactgagggaatgcgaaaaccagcatttctttcaggtgaacagaagaaagccattgttgatttactcttcaaaacaaatcgaaaagtaaccgttaagcaattaaaagaagattatttcaaaaaaatagaatgttttgatagtgttgaaatttcaggagttgaagatagatttaatgcttcattaggcgcctaccatgatttgctaaaaattattaaagataaagattttttggataatgaagaaaatgaagatatcttagaggatattgttttaacattgaccttatttgaagatagggggatgattgaggaaagacttaaaacatatgctcacctctttgatgataaggtgatgaaacagcttaaacgtcgccgttatactggttggggacgtttgtctcgaaaattgattaatggtattagggataagcaatctggcaaaacaatattagattttttgaaatcagatggttttgccaatcgcaattttatgcagctgatccatgatgatagtttgacatttaaagaagatattcaaaaagcacaggtgtctggacaaggccatagtttacatgaacagattgctaacttagctggcagtcctgctattaaaaaaggtattttacagactgtaaaaattgttgatgaactggtcaaagtaatggggcataagccagaaaatatcgttattgaaatggcacgtgaaaatcagacaactcaaaagggccagaaaaattcgcgagagcgtatgaaacgaatcgaagaaggtatcaaagaattaggaagtcagattcttaaagagcatcctgttgaaaatactcaattgcaaaatgaaaagctctatctctattatctacaaaatggaagagacatgtatgtggaccaagaattagatattaatcgtttaagtgattatgatgtcgatcacattgttccacaaagtttcattaaagacgattcaatagacaataaggtactaacgcgttctgataaaaatcgtggtaaatcggataacgttccaagtgaagaagtagtcaaaaagatgaaaaactattggagacaacttctaaacgccaagttaatcactcaacgtaagtttgataatttaacgaaagctgaacgtggaggtttgagtgaacttgataaagctggttttatcaaacgccaattggttgaaactcgccaaatcactaagcatgtggcacaaattttggatagtcgcatgaatactaaatacgatgaaaatgataaacttattcgagaggttaaagtgattaccttaaaatctaaattagtttctgacttccgaaaagatttccaattctataaagtacgtgagattaacaattaccatcatgcccatgatgcgtatctaaatgccgtcgttggaactgctttgattaagaaatatccaaaacttgaatcggagtttgtctatggtgattataaagtttatgatgttcgtaaaatgattgctaagtctgagcaagaaataggcaaagcaaccgcaaaatatttcttttactctaatatcatgaacttcttcaaaacagaaattacacttgcaaatggagagattcgcaaacgccctctaatcgaaactaatggggaaactggagaaattgtctgggataaagggcgagattttgccacagtgcgcaaagtattgtccatgccccaagtcaatattgtcaagaaaacagaagtacagacaggcggattctccaaggagtcaattttaccaaaaagaaattcggacaagcttattgctcgtaaaaaagactgggatccaaaaaaatatggtggttttgatagtccaacggtagcttattcagtcctagtggttgctaaggtggaaaaagggaaatcgaagaagttaaaatccgttaaagagttactagggatcacaattatggaaagaagttcctttgaaaaaaatccgattgactttttagaagctaaaggatataaggaagttaaaaaagacttaatcattaaactacctaaatatagtctttttgagttagaaaacggtcgtaaacggatgctggctagtgccggagaattacaaaaaggaaatgagctggctctgccaagcaaatatgtgaattttttatatttagctagtcattatgaaaagttgaagggtagtccagaagataacgaacaaaaacaattgtttgtggagcagcataagcattatttagatgagattattgagcaaatcagtgaattttctaagcgtgttattttagcagatgccaatttagataaagttcttagtgcatataacaaacatagagacaaaccaatacgtgaacaagcagaaaatattattcatttatttacgttgacgaatcttggagctcccgctgcttttaaatattttgatacaacaattgatcgtaaacgatatacgtctacaaaagaagttttagatgccactcttatccatcaatccatcactggtctttatgaaacacgcattgatttgagtcagctaggaggtgactga

SEQ ID NO: 199 - protein, 1367 aa, Streptococcus pyogenes
  REGION 1..1367: note = MISC_FEATURE - spCas9 polypeptide sequence
MDKKYSIGLDIGTNSVGWAVITDDYKVPSKKFKVLGNTDRHSIKKNLIGALLFGSGETAEATRLKRTARRRYTRRKNRICYLQEIFSNEMAKVDDSFFHRLEESFLVEEDKKHERHPIFGNIVDEVAYHEKYPTIYHLRKKLADSTDKADLRLIYLALAHMIKFRGHFLIEGDLNPDNSDVDKLFIQLVQIYNQLFEENPINASRVDAKAILSARLSKSRRLENLIAQLPGEKRNGLFGNLIALSLGLTPNFKSNFDLAEDAKLQLSKDTYDDDLDNLLAQIGDQYADLFLAAKNLSDAILLSDILRVNSEITKAPLSASMIKRYDEHHQDLTLLKALVRQQLPEKYKEIFFDQSKNGYAGYIDGGASQEEFYKFIKPILEKMDGTEELLVKLNREDLLRKQRTFDNGSIPHQIHLGELHAILRRQEDFYPFLKDNREKIEKILTFRIPYYVGPLARGNSRFAWMTRKSEETITPWNFEEVVDKGASAQSFIERMTNFDKNLPNEKVLPKHSLLYEYFTVYNELTKVKYVTEGMRKPAFLSGEQKKAIVDLLFKTNRKVTVKQLKEDYFKKIECFDSVEISGVEDRFNASLGAYHDLLKIIKDKDFLDNEENEDILEDIVLTLTLFEDRGMIEERLKTYAHLFDDKVMKQLKRRRYTGWGRLSRKLINGIRDKQSGKTILDFLKSDGFANRNFMQLIHDDSLTFKEDIQKAQVSGQGHSLHEQIANLAGSPAIKKGILQTVKIVDELVKVMGHKPENIVIEMARENQTTQKGQKNSRERMKRIEEGIKELGSQILKEHPVENTQLQNEKLYLYYLQNGRDMYVDQELDINRLSDYDVDHIVPQSFIKDDSIDNKVLTRSDKNRGKSDNVPSEEVVKKMKNYWRQLLNAKLITQRKFDNLTKAERGGLSELDKAGFIKRQLVETRQITKHVAQILDSRMNTKYDENDKLIREVKVITLKSKLVSDFRKDFQFYKVREINNYHHAHDAYLNAVVGTALIKKYPKLESEFVYGDYKVYDVRKMIAKSEQEIGKATAKYFFYSNIMNFFKTEITLANGEIRKRPLIETNGETGEIVWDKGRDFATVRKVLSMPQVNIVKKTEVQTGGFSKESILPKRNSDKLIARKKDWDPKKYGGFDSPTVAYSVLVVAKVEKGKSKKLKSVKELLGITIMERSSFEKNPIDFLEAKGYKEVKKDLIIKLPKYSLFELENGRKRMLASAGELQKGNELALPSKYVNFLYLASHYEKLKGSPEDNEQKQLFVEQHKHYLDEIIEQISEFSKRVILADANLDKVLSAYNKHRDKPIREQAENIIHLFTLTNLGAPAAFKYFDTTIDRKRYTSTKEVLDATLIHQSITGLYETRIDLSQLGGD

SEQ ID NO: 200 - DNA, 4212 bp, synthetic construct
  misc_feature 1..4212: note = wild-type Cas9 polynucleotide sequence
  misc_feature 5..58: note = RuvC domain
  misc_feature 718..764: note = RuvC domain
  misc_feature 772..901: note = HNH domain
  misc_feature 906..1101: note = RuvC domain
  source 1..4212: mol_type = other DNA
atggataaaaagtattctattggtttagacatcggcactaattccgttggatgggctgtcataaccgatgaatacaaagtaccttcaaagaaatttaaggtgttggggaacacagaccgtcattcgattaaaaagaatcttatcggtgccctcctattcgatagtggcgaaacggcagaggcgactcgcctgaaacgaaccgctcggagaaggtatacacgtcgcaagaaccgaatatgttacttacaagaaatttttagcaatgagatggccaaagttgacgattctttctttcaccgtttggaagagtccttccttgtcgaagaggacaagaaacatgaacggcaccccatctttggaaacatagtagatgaggtggcatatcatgaaaagtacccaacgatttatcacctcagaaaaaagctagttgactcaactgataaagcggacctgaggttaatctacttggctcttgcccatatgataaagttccgtgggcactttctcattgagggtgatctaaatccggacaactcggatgtcgacaaactgttcatccagttagtacaaacctataatcagttgtttgaagagaaccctataaatgcaagtggcgtggatgcgaaggctattcttagcgcccgcctctctaaatcccgacggctagaaaacctgatcgcacaattacccggagagaagaaaaatgggttgttcggtaaccttatagcgctctcactaggcctgacaccaaattttaagtcgaacttcgacttagctgaagatgccaaattgcagcttagtaaggacacgtacgatgacgatctcgacaatctactggcacaaattggagatcagtatgcggacttatttttggctgccaaaaaccttagcgatgcaatcctcctatctgacatactgagagttaatactgagattaccaaggcgccgttatccgcttcaatgatcaaaaggtacgatgaacatcaccaagacttgacacttctcaaggccctagtccgtcagcaactgcctgagaaatataaggaaatattctttgatcagtcgaaaaacgggtacgcaggttatattgacggcggagcgagtcaagaggaattctacaagtttatcaaacccatattagagaagatggatgggacggaagagttgcttgtaaaactcaatcgcgaagatctactgcgaaagcagcggactttcgacaacggtagcattccacatcaaatccacttaggcgaattgcatgctatacttagaaggcaggaggatttttatccgttcctcaaagacaatcgtgaaaagattgagaaaatcctaacctttcgcataccttactatgtgggacccctggcccgagggaactctcggttcgcatggatgacaagaaagtccgaagaaacgattactccatggaattttgaggaagttgtcgataaaggtgcgtcagctcaatcgttcatcgagaggatgaccaactttgacaagaatttaccgaacgaaaaagtattgcctaagcacagtttactttacgagtatttcacagtgtacaatgaactcacgaaagttaagtatgtcactgagggcatgcgtaaacccgcctttctaagcggagaacagaagaaagcaatagtagatctgttattcaagaccaaccgcaaagtgacagttaagcaattgaaagaggactactttaagaaaattgaatgcttcgattctgtcgagatctccggggtagaagatcgatttaatgcgtcacttggtacgtatcatgacctcctaaagataattaaagataaggacttcctggataacgaagagaatgaagatatcttagaagatatagtgttgactcttaccctctttgaagatcgggaaatgattgaggaaagactaaaaacatacgctcacctgttcgacgataaggttatgaaacagttaaagaggcgtcgctatacgggctggggacgattgtcgcggaaacttatcaacgggataagagacaagcaaagtggtaaaactattctcgattttctaaagagcgacggcttcgccaataggaactttatgcagctgatccatgatgactctttaaccttcaaagaggatatacaaaaggcacaggtttccggacaaggggactcattgcacgaacatattgcgaatcttgctggttcgccagccatcaaaaagggcatactccagacagtcaaagtagtggatgagctagttaaggtcatgggacgtcacaaaccggaaaacattgtaatcgagatggcacgcgaaaatcaaacgactcagaaggggcaaaaaaacagtcgagagcggatgaagagaatagaagagggtattaaagaactgggcagccagatcttaaaggagcatcctgtggaaaatacccaattgcagaacgagaaactttacctctattacctacaaaatggaagggacatgtatgttgatcaggaactggacataaaccgtttatctgattacgacgtcgatcacattgtaccccaatcctttttgaaggacgattcaatcgacaataaagtgcttacacgctcggataagaaccgagggaaaagtgacaatgttccaagcgaggaagtcgtaaagaaaatgaagaactattggcggcagctcctaaatgcgaaactgataacgcaaagaaagttcgataacttaactaaagctgagaggggtggcttgtctgaacttgacaaggccggatttattaaacgtcagctcgtggaaacccgccaaatcacaaagcatgttgcacagatactagattcccgaatgaatacgaaatacgacgagaacgataagctgattcgggaagtcaaagtaatcactttaaagtcaaaattggtgtcggacttcagaaaggattttcaattctataaagttagggagataaataactaccaccatgcgcacgacgcttatcttaatgccgtcgtagggaccgcactcattaagaaatacccgaagctagaaagtgagtttgtgtatggtgattacaaagtttatgacgtccgtaagatgatcgcgaaaagcgaacaggagataggcaaggctacagccaaatacttcttttattctaacattatgaatttctttaagacggaaatcactctggcaaacggagagatacgcaaacgacctttaattgaaaccaatggggagacaggtgaaatcgtatgggataagggccgggacttcgcgacggtgagaaaagttttgtccatgccccaagtcaacatagtaaagaaaactgaggtgcagaccggagggttttcaaaggaatcgattcttccaaaaaggaatagtgataagctcatcgctcgtaaaaaggactgggacccgaaaaagtacggtggcttcgatagccctacagttgcctattctgtcctagtagtggcaaaagttgagaagggaaaatccaagaaactgaagtcagtcaaagaattattggggataacgattatggagcgctcgtcttttgaaaagaaccccatcgacttccttgaggcgaaaggttacaaggaagtaaaaaaggatctcataattaaactaccaaagtatagtctgtttgagttagaaaatggccgaaaacggatgttggctagcgccggagagcttcaaaaggggaacgaactcgcactaccgtctaaatacgtgaatttcctgtatttagcgtcccattacgagaagttgaaaggttcacctgaagataacgaacagaagcaactttttgttgagcagcacaaacattatctcgacgaaatcatagagcaaatttcggaattcagtaagagagtcatcctagctgatgccaatctggacaaagtattaagcgcatacaacaagcacagggataaacccatacgtgagcaggcggaaaatattatccatttgtttactcttaccaacctcggcgctccagccgcattcaagtattttgacacaacgatagatcgcaaacgatacacttctaccaaggaggtgctagacgcgacactgattcaccaatccatcacgggattatatgaaactcggatagatttgtcacagcttgggggtgacggatcccccaagaagaagaggaaagtctcgagcgactacaaagaccatgacggtgattataaagatcatgacatcgattacaaggatgacgatgacaaggctgcagga

SEQ ID NO: 201 - protein, 1368 aa, synthetic construct
  REGION 1..1368: note = exemplary catalytically active Cas9 nickase (nCas9) polypeptide sequence
MDKKYSIGLAIGTNSVGWAVITDEYKVPSKKFKVLGNTDRHSIKKNLIGALLFDSGETAEATRLKRTARRRYTRRKNRICYLQEIFSNEMAKVDDSFFHRLEESFLVEEDKKHERHPIFGNIVDEVAYHEKYPTIYHLRKKLVDSTDKADLRLIYLALAHMIKFRGHFLIEGDLNPDNSDVDKLFIQLVQTYNQLFEENPINASGVDAKAILSARLSKSRRLENLIAQLPGEKKNGLFGNLIALSLGLTPNFKSNFDLAEDAKLQLSKDTYDDDLDNLLAQIGDQYADLFLAAKNLSDAILLSDILRVNTEITKAPLSASMIKRYDEHHQDLTLLKALVRQQLPEKYKEIFFDQSKNGYAGYIDGGASQEEFYKFIKPILEKMDGTEELLVKLNREDLLRKQRTFDNGSIPHQIHLGELHAILRRQEDFYPFLKDNREKIEKILTFRIPYYVGPLARGNSRFAWMTRKSEETITPWNFEEVVDKGASAQSFIERMTNFDKNLPNEKVLPKHSLLYEYFTVYNELTKVKYVTEGMRKPAFLSGEQKKAIVDLLFKTNRKVTVKQLKEDYFKKIECFDSVEISGVEDRFNASLGTYHDLLKIIKDKDFLDNEENEDILEDIVLTLTLFEDREMIEERLKTYAHLFDDKVMKQLKRRRYTGWGRLSRKLINGIRDKQSGKTILDFLKSDGFANRNFMQLIHDDSLTFKEDIQKAQVSGQGDSLHEHIANLAGSPAIKKGILQTVKVVDELVKVMGRHKPENIVIEMARENQTTQKGQKNSRERMKRIEEGIKELGSQILKEHPVENTQLQNEKLYLYYLQNGRDMYVDQELDINRLSDYDVDHIVPQSFLKDDSIDNKVLTRSDKNRGKSDNVPSEEVVKKMKNYWRQLLNAKLITQRKFDNLTKAERGGLSELDKAGFIKRQLVETRQITKHVAQILDSRMNTKYDENDKLIREVKVITLKSKLVSDFRKDFQFYKVREINNYHHAHDAYLNAVVGTALIKKYPKLESEFVYGDYKVYDVRKMIAKSEQEIGKATAKYFFYSNIMNFFKTEITLANGEIRKRPLIETNGETGEIVWDKGRDFATVRKVLSMPQVNIVKKTEVQTGGFSKESILPKRNSDKLIARKKDWDPKKYGGFDSPTVAYSVLVVAKVEKGKSKKLKSVKELLGITIMERSSFEKNPIDFLEAKGYKEVKKDLIIKLPKYSLFELENGRKRMLASAGELQKGNELALPSKYVNFLYLASHYEKLKGSPEDNEQKQLFVEQHKHYLDEIIEQISEFSKRVILADANLDKVLSAYNKHRDKPIREQAENIIHLFTLTNLGAPAAFKYFDTTIDRKRYTSTKEVLDATLIHQSITGLYETRIDLSQLGGD

SEQ ID NO: 202 - DNA, 4107 bp, Streptococcus pyogenes
  misc_feature 1..4107: note = Cas9 from Streptococcus pyogenes (NCBI Ref. Seq.: NC_002737.2)polynucleotide sequence
  source 1..4107: mol_type = genomic DNA
atggataagaaatactcaataggcttagatatcggcacaaatagcgtcggatgggcggtgatcactgatgaatataaggttccgtctaaaaagttcaaggttctgggaaatacagaccgccacagtatcaaaaaaaatcttataggggctcttttatttgacagtggagagacagcggaagcgactcgtctcaaacggacagctcgtagaaggtatacacgtcggaagaatcgtatttgttatctacaggagattttttcaaatgagatggcgaaagtagatgatagtttctttcatcgacttgaagagtcttttttggtggaagaagacaagaagcatgaacgtcatcctatttttggaaatatagtagatgaagttgcttatcatgagaaatatccaactatctatcatctgcgaaaaaaattggtagattctactgataaagcggatttgcgcttaatctatttggccttagcgcatatgattaagtttcgtggtcattttttgattgagggagatttaaatcctgataatagtgatgtggacaaactatttatccagttggtacaaacctacaatcaattatttgaagaaaaccctattaacgcaagtggagtagatgctaaagcgattctttctgcacgattgagtaaatcaagacgattagaaaatctcattgctcagctccccggtgagaagaaaaatggcttatttgggaatctcattgctttgtcattgggtttgacccctaattttaaatcaaattttgatttggcagaagatgctaaattacagctttcaaaagatacttacgatgatgatttagataatttattggcgcaaattggagatcaatatgctgatttgtttttggcagctaagaatttatcagatgctattttactttcagatatcctaagagtaaatactgaaataactaaggctcccctatcagcttcaatgattaaacgctacgatgaacatcatcaagacttgactcttttaaaagctttagttcgacaacaacttccagaaaagtataaagaaatcttttttgatcaatcaaaaaacggatatgcaggttatattgatgggggagctagccaagaagaattttataaatttatcaaaccaattttagaaaaaatggatggtactgaggaattattggtgaaactaaatcgtgaagatttgctgcgcaagcaacggacctttgacaacggctctattccccatcaaattcacttgggtgagctgcatgctattttgagaagacaagaagacttttatccatttttaaaagacaatcgtgagaagattgaaaaaatcttgacttttcgaattccttattatgttggtccattggcgcgtggcaatagtcgttttgcatggatgactcggaagtctgaagaaacaattaccccatggaattttgaagaagttgtcgataaaggtgcttcagctcaatcatttattgaacgcatgacaaactttgataaaaatcttccaaatgaaaaagtactaccaaaacatagtttgctttatgagtattttacggtttataacgaattgacaaaggtcaaatatgttactgaaggaatgcgaaaaccagcatttctttcaggtgaacagaagaaagccattgttgatttactcttcaaaacaaatcgaaaagtaaccgttaagcaattaaaagaagattatttcaaaaaaatagaatgttttgatagtgttgaaatttcaggagttgaagatagatttaatgcttcattaggtacctaccatgatttgctaaaaattattaaagataaagattttttggataatgaagaaaatgaagatatcttagaggatattgttttaacattgaccttatttgaagatagggagatgattgaggaaagacttaaaacatatgctcacctctttgatgataaggtgatgaaacagcttaaacgtcgccgttatactggttggggacgtttgtctcgaaaattgattaatggtattagggataagcaatctggcaaaacaatattagattttttgaaatcagatggttttgccaatcgcaattttatgcagctgatccatgatgatagtttgacatttaaagaagacattcaaaaagcacaagtgtctggacaaggcgatagtttacatgaacatattgcaaatttagctggtagccctgctattaaaaaaggtattttacagactgtaaaagttgttgatgaattggtcaaagtaatggggcggcataagccagaaaatatcgttattgaaatggcacgtgaaaatcagacaactcaaaagggccagaaaaattcgcgagagcgtatgaaacgaatcgaagaaggtatcaaagaattaggaagtcagattcttaaagagcatcctgttgaaaatactcaattgcaaaatgaaaagctctatctctattatctccaaaatggaagagacatgtatgtggaccaagaattagatattaatcgtttaagtgattatgatgtcgatcacattgttccacaaagtttccttaaagacgattcaatagacaataaggtcttaacgcgttctgataaaaatcgtggtaaatcggataacgttccaagtgaagaagtagtcaaaaagatgaaaaactattggagacaacttctaaacgccaagttaatcactcaacgtaagtttgataatttaacgaaagctgaacgtggaggtttgagtgaacttgataaagctggttttatcaaacgccaattggttgaaactcgccaaatcactaagcatgtggcacaaattttggatagtcgcatgaatactaaatacgatgaaaatgataaacttattcgagaggttaaagtgattaccttaaaatctaaattagtttctgacttccgaaaagatttccaattctataaagtacgtgagattaacaattaccatcatgcccatgatgcgtatctaaatgccgtcgttggaactgctttgattaagaaatatccaaaacttgaatcggagtttgtctatggtgattataaagtttatgatgttcgtaaaatgattgctaagtctgagcaagaaataggcaaagcaaccgcaaaatatttcttttactctaatatcatgaacttcttcaaaacagaaattacacttgcaaatggagagattcgcaaacgccctctaatcgaaactaatggggaaactggagaaattgtctgggataaagggcgagattttgccacagtgcgcaaagtattgtccatgccccaagtcaatattgtcaagaaaacagaagtacagacaggcggattctccaaggagtcaattttaccaaaaagaaattcggacaagcttattgctcgtaaaaaagactgggatccaaaaaaatatggtggttttgatagtccaacggtagcttattcagtcctagtggttgctaaggtggaaaaagggaaatcgaagaagttaaaatccgttaaagagttactagggatcacaattatggaaagaagttcctttgaaaaaaatccgattgactttttagaagctaaaggatataaggaagttaaaaaagacttaatcattaaactacctaaatatagtctttttgagttagaaaacggtcgtaaacggatgctggctagtgccggagaattacaaaaaggaaatgagctggctctgccaagcaaatatgtgaattttttatatttagctagtcattatgaaaagttgaagggtagtccagaagataacgaacaaaaacaattgtttgtggagcagcataagcattatttagatgagattattgagcaaatcagtgaattttctaagcgtgttattttagcagatgccaatttagataaagttcttagtgcatataacaaacatagagacaaaccaatacgtgaacaagcagaaaatattattcatttatttacgttgacgaatcttggagctcccgctgcttttaaatattttgatacaacaattgatcgtaaacgatatacgtctacaaaagaagttttagatgccactcttatccatcaatccatcactggtctttatgaaacacgcattgatttgagtcagctaggaggtgactga

SEQ ID NO: 203 - protein, 1368 aa, synthetic construct
  REGION 1..1368: note = catalytically inactive Cas9 (dCas9)polypeptide sequence
  REGION 5..58: note = MISC_FEATURE - RuvC domain
  REGION 718..764: note = MISC_FEATURE - RuvC domain
  REGION 773..902: note = MISC_FEATURE - HNH domain
  REGION 907..1102: note = MISC_FEATURE - RuvC domain
MDKKYSIGLAIGTNSVGWAVITDEYKVPSKKFKVLGNTDRHSIKKNLIGALLFDSGETAEATRLKRTARRRYTRRKNRICYLQEIFSNEMAKVDDSFFHRLEESFLVEEDKKHERHPIFGNIVDEVAYHEKYPTIYHLRKKLVDSTDKADLRLIYLALAHMIKFRGHFLIEGDLNPDNSDVDKLFIQLVQTYNQLFEENPINASGVDAKAILSARLSKSRRLENLIAQLPGEKKNGLFGNLIALSLGLTPNFKSNFDLAEDAKLQLSKDTYDDDLDNLLAQIGDQYADLFLAAKNLSDAILLSDILRVNTEITKAPLSASMIKRYDEHHQDLTLLKALVRQQLPEKYKEIFFDQSKNGYAGYIDGGASQEEFYKFIKPILEKMDGTEELLVKLNREDLLRKQRTFDNGSIPHQIHLGELHAILRRQEDFYPFLKDNREKIEKILTFRIPYYVGPLARGNSRFAWMTRKSEETITPWNFEEVVDKGASAQSFIERMTNFDKNLPNEKVLPKHSLLYEYFTVYNELTKVKYVTEGMRKPAFLSGEQKKAIVDLLFKTNRKVTVKQLKEDYFKKIECFDSVEISGVEDRFNASLGTYHDLLKIIKDKDFLDNEENEDILEDIVLTLTLFEDREMIEERLKTYAHLFDDKVMKQLKRRRYTGWGRLSRKLINGIRDKQSGKTILDFLKSDGFANRNFMQLIHDDSLTFKEDIQKAQVSGQGDSLHEHIANLAGSPAIKKGILQTVKVVDELVKVMGRHKPENIVIEMARENQTTQKGQKNSRERMKRIEEGIKELGSQILKEHPVENTQLQNEKLYLYYLQNGRDMYVDQELDINRLSDYDVDAIVPQSFLKDDSIDNKVLTRSDKNRGKSDNVPSEEVVKKMKNYWRQLLNAKLITQRKFDNLTKAERGGLSELDKAGFIKRQLVETRQITKHVAQILDSRMNTKYDENDKLIREVKVITLKSKLVSDFRKDFQFYKVREINNYHHAHDAYLNAVVGTALIKKYPKLESEFVYGDYKVYDVRKMIAKSEQEIGKATAKYFFYSNIMNFFKTEITLANGEIRKRPLIETNGETGEIVWDKGRDFATVRKVLSMPQVNIVKKTEVQTGGFSKESILPKRNSDKLIARKKDWDPKKYGGFDSPTVAYSVLVVAKVEKGKSKKLKSVKELLGITIMERSSFEKNPIDFLEAKGYKEVKKDLIIKLPKYSLFELENGRKRMLASAGELQKGNELALPSKYVNFLYLASHYEKLKGSPEDNEQKQLFVEQHKHYLDEIIEQISEFSKRVILADANLDKVLSAYNKHRDKPIREQAENIIHLFTLTNLGAPAAFKYFDTTIDRKRYTSTKEVLDATLIHQSITGLYETRIDLSQLGGD

SEQ ID NO: 204 - protein, 345 aa, Sulfolobus islandicus
  REGION 1..345: note = MISC_FEATURE - tr|F0NN87|F0NN87_SULIHCRISPR-associatedCasx protein OS =Sulfolobus islandicus (strain HVE10/4) GN = SiH_0402 PE=4; SV = 1);CasX polypeptide sequence
MEVPLYNIFGDNYIIQVATEAENSTIYNNKVEIDDEELRNVLNLAYKIAKNNEDAAAERRGKAKKKKGEEGETTTSNIILPLSGNDKNPWTETLKCYNFPTTVALSEVFKNFSQVKECEEVSAPSFVKPEFYEFGRSPGMVERTRRVKLEVEPHYLIIAAAGWVLTRLGKAKVSEGDYVGVNVFTPTRGILYSLIQNVNGIVPGIKPETAFGLWIARKVVSSVTNPNVSVVRIYTISDAVGQNPTTINGGFSIDLTKLLEKRYLLSERLEAIARNALSISSNMRERYIVLANYIYEYLTGSKRLEDLLYFANRDLIMNLNSDDGKVRDLKLISAYVNGELIRGEG

SEQ ID NO: 205 - protein, 345 aa, Sulfolobus islandicus
  REGION 1..345: note = MISC_FEATURE - tr|F0NH53|F0NH53_SULIR CRISPR associated protein, Casx OS =Sulfolobus islandicus (strain REY15A) GN=SiRe_0771 PE=4 SV=1);CasX polypeptide sequence
MEVPLYNIFGDNYIIQVATEAENSTIYNNKVEIDDEELRNVLNLAYKIAKNNEDAAAERRGKAKKKKGEEGETTTSNIILPLSGNDKNPWTETLKCYNFPTTVALSEVFKNFSQVKECEEVSAPSFVKPEFYKFGRSPGMVERTRRVKLEVEPHYLIMAAAGWVLTRLGKAKVSEGDYVGVNVFTPTRGILYSLIQNVNGIVPGIKPETAFGLWIARKVVSSVTNPNVSVVSIYTISDAVGQNPTTINGGFSIDLTKLLEKRDLLSERLEAIARNALSISSNMRERYIVLANYIYEYLTGSKRLEDLLYFANRDLIMNLNSDDGKVRDLKLISAYVNGELIRGEG

SEQ ID NO: 206 - protein, 987 aa, unidentified
  REGION 1..987: note = MISC_FEATURE - CasX polypeptide sequence
MEKRINKIRKKLSADNATKPVSRSGPMKTLLVRVMTDDLKKRLEKRRKKPEVMPQVISNNAANNLRMLLDDYTKMKEAILQVYWQEFKDDHVGLMCKFAQPASKKIDQNKLKPEMDEKGNLTTAGFACSQCGQPLFVYKLEQVSEKGKAYTNYFGRCNVAEHEKLILLAQLKPVKDSDEAVTYSLGKFGQRALDFYSIHVTKESTHPVKPLAQIAGNRYASGPVGKALSDACMGTIASFLSKYQDIIIEHQKVVKGNQKRLESLRELAGKENLEYPSVTLPPQPHTKEGVDFAYNEVIARVRMWVNLNLWQKLKLSRDDAKPLLRLKGFPSFPVVERRENEVDWWNTINEVKKLIDAKRDMGRVFWSGVTAEKRNTILEGYNYLPNENDHKKREGSLENPKKPAKRQFGDLLLYLEKKYAGDWGKVFDEAWERIDKKIAGLTSHIEREEARNAEDAQSKAVLTDWLRAKASFVLERLKEMDEKEFYACEIQLQKWYGDLRGNPFAVEAENRVVDISGFSIGSDGHSIQYRNLLAWKYLENGKREFYLLMNYGKKGRIRFTDGTDIKKSGKWQGLLYGGGKAKVIDLTFDPDDEQLIILPLAFGTRQGREFIWNDLLSLETGLIKLANGRVIEKTIYNKKIGRDEPALFVALTFERREVVDPSNIKPVNLIGVARGENIPAVIALTDPEGCPLPEFKDSSGGPTDILRIGEGYKEKQRAIQAAKEVEQRRAGGYSRKFASKSRNLADDMVRNSARDLFYHAVTHDAVLVFANLSRGFGRQGKRTFMTERQYTKMEDWLTAKLAYEGLTSKTYLSKTLAQYTSKTCSNCGFTITYADMDVMLVRLKKTSDGWATTLNNKELKAEYQITYYNRYKRQTVEKELSAELDRLSEESGNNDISKWTKGRRDEALFLLKKRFSHRPVQEQFVCLDCGHEVHAAEQAALNIARSWLFLNSNSTEFKSYKSGKQPFVGAWQAFYKRRLKEVWKPNA

SEQ ID NO: 207 - protein, 1210 aa, unidentified
  REGION 1..1210: note = MISC_FEATURE - APG80656.1 CRISPR-associated protein CasY [uncultured Parcubacteria group bacterium]; CasY polypeptide sequence
MSKRHPRISGVKGYRLHAQRLEYTGKSGAMRTIKYPLYSSPSGGRTVPREIVSAINDDYVGLYGLSNFDDLYNAEKRNEEKVYSVLDFWYDCVQYGAVFSYTAPGLLKNVAEVRGGSYELTKTLKGSHLYDELQIDKVIKFLNKKEISRANGSLDKLKKDIIDCFKAEYRERHKDQCNKLADDIKNAKKDAGASLGERQKKLFRDFFGISEQSENDKPSFTNPLNLTCCLLPFDTVNNNRNRGEVLFNKLKEYAQKLDKNEGSLEMWEYIGIGNSGTAFSNFLGEGFLGRLRENKITELKKAMMDITDAWRGQEQEEELEKRLRILAALTIKLREPKFDNHWGGYRSDINGKLSSWLQNYINQTVKIKEDLKGHKKDLKKAKEMINRFGESDTKEEAVVSSLLESIEKIVPDDSADDEKPDIPAIAIYRRFLSDGRLTLNRFVQREDVQEALIKERLEAEKKKKPKKRKKKSDAEDEKETIDFKELFPHLAKPLKLVPNFYGDSKRELYKKYKNAAIYTDALWKAVEKIYKSAFSSSLKNSFFDTDFDKDFFIKRLQKIFSVYRRFNTDKWKPIVKNSFAPYCDIVSLAENEVLYKPKQSRSRKSAAIDKNRVRLPSTENIAKAGIALARELSVAGFDWKDLLKKEEHEEYIDLIELHKTALALLLAVTETQLDISALDFVENGTVKDFMKTRDGNLVLEGRFLEMFSQSIVFSELRGLAGLMSRKEFITRSAIQTMNGKQAELLYIPHEFQSAKITTPKEMSRAFLDLAPAEFATSLEPESLSEKSLLKLKQMRYYPHYFGYELTRTGQGIDGGVAENALRLEKSPVKKREIKCKQYKTLGRGQNKIVLYVRSSYYQTQFLEWFLHRPKNVQTDVAVSGSFLIDEKKVKTRWNYDALTVALEPVSGSERVFVSQPFTIFPEKSAEEEGQRYLGIDIGEYGIAYTALEITGDSAKILDQNFISDPQLKTLREEVKGLKLDQRRGTFAMPSTKIARIRESLVHSLRNRIHHLALKHKAKIVYELEVSRFEEGKQKIKKVYATLKKADVYSEIDADKNLQTTVWGKLAVASEISASYTSQFCGACKKLWRAEMQVDETITTQELIGTVRVIKGGTLIDAIKDFMRPPIFDENDTPFPKYRDFCDKHHISKKMRGNSCLFICPFCRANADADIQASQTIALLRYVKEEKKVEDYFERFRKLKNIKVLGQMKKI

SEQ ID NO: 208 - protein, 1082 aa, Neisseria meningitidis
  REGION 1..1082: note = MISC_FEATURE - NCBI Reference: WP_002235162.1; type II CRISPR RNA-guided endonuclease Cas9; Nme1Cas9 polypeptide sequence
MAAFKPNPINYILGLDIGIASVGWAMVEIDEDENPICLIDLGVRVFERAEVPKTGDSLAMARRLARSVRRLTRRRAHRLLRARRLLKREGVLQAADFDENGLIKSLPNTPWQLRAAALDRKLTPLEWSAVLLHLIKHRGYLSQRKNEGETADKELGALLKGVADNAHALQTGDFRTPAELALNKFEKESGHIRNQRGDYSHTFSRKDLQAELILLFEKQKEFGNPHVSGGLKEGIETLLMTQRPALSGDAVQKMLGHCTFEPAEPKAAKNTYTAERFIWLTKLNNLRILEQGSERPLTDTERATLMDEPYRKSKLTYAQARKLLGLEDTAFFKGLRYGKDNAEASTLMEMKAYHAISRALEKEGLKDKKSPLNLSPELQDEIGTAFSLFKTDEDITGRLKDRIQPEILEALLKHISFDKFVQISLKALRRIVPLMEQGKRYDEACAEIYGDHYGKKNTEEKIYLPPIPADEIRNPVVLRALSQARKVINGVVRRYGSPARIHIETAREVGKSFKDRKEIEKRQEENRKDREKAAAKFREYFPNFVGEPKSKDILKLRLYEQQHGKCLYSGKEINLGRLNEKGYVEIDHALPFSRTWDDSFNNKVLVLGSENQNKGNQTPYEYFNGKDNSREWQEFKARVETSRFPRSKKQRILLQKFDEDGFKERNLNDTRYVNRFLCQFVADRMRLTGKGKKRVFASNGQITNLLRGFWGLRKVRAENDRHHALDAVVVACSTVAMQQKITRFVRYKEMNAFDGKTIDKETGEVLHQKTHFPQPWEFFAQEVMIRVFGKPDGKPEFEEADTPEKLRTLLAEKLSSRPEAVHEYVTPLFVSRAPNRKMSGQGHMETVKSAKRLDEGVSVLRVPLTQLKLKDLEKMVNREREPKLYEALKARLEAHKDDPAKAFAEPFYKYDKAGNRTQQVKAVRVEQVQKTGVWVRNHNGIADNATMVRVDVFEKGDKYYLVPIYSWQVAKGILPDRAVVQGKDEEDWQLIDDSFNFKFSLHPNDLVEVITKKARMFGYFASCHRGTGNINIRIHDLDHKIGKNGILEGIGVKTALSFQKYQIDELGKEIRPCRLKKRPPVR

SEQ ID NO: 209 - protein, 1082 aa, Neisseria meningitidis
  REGION 1..1082: note = MISC_FEATURE - NCBI Reference: WP_002230835; type II CRISPR RNA-guided endonuclease Cas9; Nme2Cas9 polypeptide sequence
MAAFKPNPINYILGLDIGIASVGWAMVEIDEEENPIRLIDLGVRVFERAEVPKTGDSLAMARRLARSVRRLTRRRAHRLLRARRLLKREGVLQAADFDENGLIKSLPNTPWQLRAAALDRKLTPLEWSAVLLHLIKHRGYLSQRKNEGETADKELGALLKGVANNAHALQTGDFRTPAELALNKFEKESGHIRNQRGDYSHTFSRKDLQAELILLFEKQKEFGNPHVSGGLKEGIETLLMTQRPALSGDAVQKMLGHCTFEPAEPKAAKNTYTAERFIWLTKLNNLRILEQGSERPLTDTERATLMDEPYRKSKLTYAQARKLLGLEDTAFFKGLRYGKDNAEASTLMEMKAYHAISRALEKEGLKDKKSPLNLSSELQDEIGTAFSLFKTDEDITGRLKDRVQPEILEALLKHISFDKFVQISLKALRRIVPLMEQGKRYDEACAEIYGDHYGKKNTEEKIYLPPIPADEIRNPVVLRALSQARKVINGVVRRYGSPARIHIETAREVGKSFKDRKEIEKRQEENRKDREKAAAKFREYFPNFVGEPKSKDILKLRLYEQQHGKCLYSGKEINLVRLNEKGYVEIDHALPFSRTWDDSFNNKVLVLGSENQNKGNQTPYEYFNGKDNSREWQEFKARVETSRFPRSKKQRILLQKFDEDGFKECNLNDTRYVNRFLCQFVADHILLTGKGKRRVFASNGQITNLLRGFWGLRKVRAENDRHHALDAVVVACSTVAMQQKITRFVRYKEMNAFDGKTIDKETGKVLHQKTHFPQPWEFFAQEVMIRVFGKPDGKPEFEEADTPEKLRTLLAEKLSSRPEAVHEYVTPLFVSRAPNRKMSGAHKDTLRSAKRFVKHNEKISVKRVWLTEIKLADLENMVNYKNGREIELYEALKARLEAYGGNAKQAFDPKDNPFYKKGGQLVKAVRVEKTQESGVLLNKKNAYTIADNGDMVRVDVFCKVDKKGKNQYFIVPIYAWQVAENILPDIDCKGYRIDDSYTFCFSLHKYDLIAFQKDEKSKVEFAYYINCDSSNGRFYLAWHDKGSKEQQFRISTQNLVLIQKYQVNELGKEIRPCRLKKRPPVR

SEQ ID NO: 210 - protein, 1300 aa, Francisella tularensis
  REGION 1..1300: note = MISC_FEATURE - wild type Cpf1 polypeptide sequence
  source 1..1300: note = subspecies novicida
MSIYQEFVNKYSLSKTLRFELIPQGKTLENIKARGLILDDEKRAKDYKKAKQIIDKYHQFFIEEILSSVCISEDLLQNYSDVYFKLKKSDDDNLQKDFKSAKDTIKKQISEYIKDSEKFKNLFNQNLIDAKKGQESDLILWLKQSKDNGIELFKANSDITDIDEALEIIKSFKGWTTYFKGFHENRKNVYSSNDIPTSIIYRIVDDNLPKFLENKAKYESLKDKAPEAINYEQIKKDLAEELTFDIDYKTSEVNQRVFSLDEVFEIANFNNYLNQSGITKFNTIIGGKFVNGENTKRKGINEYINLYSQQINDKTLKKYKMSVLFKQILSDTESKSFVIDKLEDDSDVVTTMQSFYEQIAAFKTVEEKSIKETLSLLFDDLKAQKLDLSKIYFKNDKSLTDLSQQVFDDYSVIGTAVLEYITQQIAPKNLDNPSKKEQELIAKKTEKAKYLSLETIKLALEEFNKHRDIDKQCRFEEILANFAAIPMIFDEIAQNKDNLAQISIKYQNQGKKDLLQASAEDDVKAIKDLLDQTNNLLHKLKIFHISQSEDKANILDKDEHFYLVFEECYFELANIVPLYNKIRNYITQKPYSDEKFKLNFENSTLANGWDKNKEPDNTAILFIKDDKYYLGVMNKKNNKIFDDKAIKENKGEGYKKIVYKLLPGANKMLPKVFFSAKSIKFYNPSEDILRIRNHSTHTKNGSPQKGYEKFEFNIEDCRKFIDFYKQSISKHPEWKDFGFRFSDTQRYNSIDEFYREVENQGYKLTFENISESYIDSVVNQGKLYLFQIYNKDFSAYSKGRPNLHTLYWKALFDERNLQDVVYKLNGEAELFYRKQSIPKKITHPAKEAIANKNKDNPKKESVFEYDLIKDKRFTEDKFFFHCPITINFKSSGANKFNDEINLLLKEKANDVHILSIDRGERHLAYYTLVDGKGNIIKQDTFNIIGNDRMKTNYHDKLAAIEKDRDSARKDWKKINNIKEMKEGYLSQVVHEIAKLVIEYNAIVVFEDLNFGFKRGRFKVEKQVYQKLEKMLIEKLNYLVFKDNEFDKTGGVLRAYQLTAPFETFKKMGKQTGIIYYVPAGFTSKICPVTGFVNQLYPKYESVSKSQEFFSKFDKICYNLDKGYFEFSFDYKNFGDKAAKGKWTIASFGSRLINFRNSDKNHNWDTREVYPTKELEKLLKDYSIEYGHGECIKAAICGESDKKFFAKLTSVLNTILQMRNSKTGTELDYLISPVADVNGNFFDSRQAPKNMPQDADANGAYHIGLKGLMLLGRIKNNQEGKKLNLVIKNEEYFEFVQNRNN

SEQ ID NO: 211 - protein, 1300 aa, Francisella tularensis
  REGION 1..1300: note = MISC_FEATURE - Cpf1 D917A polypeptide sequence
  source 1..1300: note = subspecies novicida
MSIYQEFVNKYSLSKTLRFELIPQGKTLENIKARGLILDDEKRAKDYKKAKQIIDKYHQFFIEEILSSVCISEDLLQNYSDVYFKLKKSDDDNLQKDFKSAKDTIKKQISEYIKDSEKFKNLFNQNLIDAKKGQESDLILWLKQSKDNGIELFKANSDITDIDEALEIIKSFKGWTTYFKGFHENRKNVYSSNDIPTSIIYRIVDDNLPKFLENKAKYESLKDKAPEAINYEQIKKDLAEELTFDIDYKTSEVNQRVFSLDEVFEIANFNNYLNQSGITKFNTIIGGKFVNGENTKRKGINEYINLYSQQINDKTLKKYKMSVLFKQILSDTESKSFVIDKLEDDSDVVTTMQSFYEQIAAFKTVEEKSIKETLSLLFDDLKAQKLDLSKIYFKNDKSLTDLSQQVFDDYSVIGTAVLEYITQQIAPKNLDNPSKKEQELIAKKTEKAKYLSLETIKLALEEFNKHRDIDKQCRFEEILANFAAIPMIFDEIAQNKDNLAQISIKYQNQGKKDLLQASAEDDVKAIKDLLDQTNNLLHKLKIFHISQSEDKANILDKDEHFYLVFEECYFELANIVPLYNKIRNYITQKPYSDEKFKLNFENSTLANGWDKNKEPDNTAILFIKDDKYYLGVMNKKNNKIFDDKAIKENKGEGYKKIVYKLLPGANKMLPKVFFSAKSIKFYNPSEDILRIRNHSTHTKNGSPQKGYEKFEFNIEDCRKFIDFYKQSISKHPEWKDFGFRFSDTQRYNSIDEFYREVENQGYKLTFENISESYIDSVVNQGKLYLFQIYNKDFSAYSKGRPNLHTLYWKALFDERNLQDVVYKLNGEAELFYRKQSIPKKITHPAKEAIANKNKDNPKKESVFEYDLIKDKRFTEDKFFFHCPITINFKSSGANKFNDEINLLLKEKANDVHILSIARGERHLAYYTLVDGKGNIIKQDTFNIIGNDRMKTNYHDKLAAIEKDRDSARKDWKKINNIKEMKEGYLSQVVHEIAKLVIEYNAIVVFEDLNFGFKRGRFKVEKQVYQKLEKMLIEKLNYLVFKDNEFDKTGGVLRAYQLTAPFETFKKMGKQTGIIYYVPAGFTSKICPVTGFVNQLYPKYESVSKSQEFFSKFDKICYNLDKGYFEFSFDYKNFGDKAAKGKWTIASFGSRLINFRNSDKNHNWDTREVYPTKELEKLLKDYSIEYGHGECIKAAICGESDKKFFAKLTSVLNTILQMRNSKTGTELDYLISPVADVNGNFFDSRQAPKNMPQDADANGAYHIGLKGLMLLGRIKNNQEGKKLNLVIKNEEYFEFVQNRNN

SEQ ID NO: 212 - protein, 1300 aa, Francisella tularensis
  REGION 1..1300: note = MISC_FEATURE - Cpf1 E1006A polypeptide sequence
  source 1..1300: note = subspecies novicida
MSIYQEFVNKYSLSKTLRFELIPQGKTLENIKARGLILDDEKRAKDYKKAKQIIDKYHQFFIEEILSSVCISEDLLQNYSDVYFKLKKSDDDNLQKDFKSAKDTIKKQISEYIKDSEKFKNLFNQNLIDAKKGQESDLILWLKQSKDNGIELFKANSDITDIDEALEIIKSFKGWTTYFKGFHENRKNVYSSNDIPTSIIYRIVDDNLPKFLENKAKYESLKDKAPEAINYEQIKKDLAEELTFDIDYKTSEVNQRVFSLDEVFEIANFNNYLNQSGITKFNTIIGGKFVNGENTKRKGINEYINLYSQQINDKTLKKYKMSVLFKQILSDTESKSFVIDKLEDDSDVVTTMQSFYEQIAAFKTVEEKSIKETLSLLFDDLKAQKLDLSKIYFKNDKSLTDLSQQVFDDYSVIGTAVLEYITQQIAPKNLDNPSKKEQELIAKKTEKAKYLSLETIKLALEEFNKHRDIDKQCRFEEILANFAAIPMIFDEIAQNKDNLAQISIKYQNQGKKDLLQASAEDDVKAIKDLLDQTNNLLHKLKIFHISQSEDKANILDKDEHFYLVFEECYFELANIVPLYNKIRNYITQKPYSDEKFKLNFENSTLANGWDKNKEPDNTAILFIKDDKYYLGVMNKKNNKIFDDKAIKENKGEGYKKIVYKLLPGANKMLPKVFFSAKSIKFYNPSEDILRIRNHSTHTKNGSPQKGYEKFEFNIEDCRKFIDFYKQSISKHPEWKDFGFRFSDTQRYNSIDEFYREVENQGYKLTFENISESYIDSVVNQGKLYLFQIYNKDFSAYSKGRPNLHTLYWKALFDERNLQDVVYKLNGEAELFYRKQSIPKKITHPAKEAIANKNKDNPKKESVFEYDLIKDKRFTEDKFFFHCPITINFKSSGANKFNDEINLLLKEKANDVHILSIDRGERHLAYYTLVDGKGNIIKQDTFNIIGNDRMKTNYHDKLAAIEKDRDSARKDWKKINNIKEMKEGYLSQVVHEIAKLVIEYNAIVVFADLNFGFKRGRFKVEKQVYQKLEKMLIEKLNYLVFKDNEFDKTGGVLRAYQLTAPFETFKKMGKQTGIIYYVPAGFTSKICPVTGFVNQLYPKYESVSKSQEFFSKFDKICYNLDKGYFEFSFDYKNFGDKAAKGKWTIASFGSRLINFRNSDKNHNWDTREVYPTKELEKLLKDYSIEYGHGECIKAAICGESDKKFFAKLTSVLNTILQMRNSKTGTELDYLISPVADVNGNFFDSRQAPKNMPQDADANGAYHIGLKGLMLLGRIKNNQEGKKLNLVIKNEEYFEFVQNRNN

SEQ ID NO: 213 - protein, 1300 aa, Francisella tularensis
  REGION 1..1300: note = MISC_FEATURE - Cpf1 D1255A polypeptide sequence
  source 1..1300: note = subspecies novicida
MSIYQEFVNKYSLSKTLRFELIPQGKTLENIKARGLILDDEKRAKDYKKAKQIIDKYHQFFIEEILSSVCISEDLLQNYSDVYFKLKKSDDDNLQKDFKSAKDTIKKQISEYIKDSEKFKNLFNQNLIDAKKGQESDLILWLKQSKDNGIELFKANSDITDIDEALEIIKSFKGWTTYFKGFHENRKNVYSSNDIPTSIIYRIVDDNLPKFLENKAKYESLKDKAPEAINYEQIKKDLAEELTFDIDYKTSEVNQRVFSLDEVFEIANFNNYLNQSGITKFNTIIGGKFVNGENTKRKGINEYINLYSQQINDKTLKKYKMSVLFKQILSDTESKSFVIDKLEDDSDVVTTMQSFYEQIAAFKTVEEKSIKETLSLLFDDLKAQKLDLSKIYFKNDKSLTDLSQQVFDDYSVIGTAVLEYITQQIAPKNLDNPSKKEQELIAKKTEKAKYLSLETIKLALEEFNKHRDIDKQCRFEEILANFAAIPMIFDEIAQNKDNLAQISIKYQNQGKKDLLQASAEDDVKAIKDLLDQTNNLLHKLKIFHISQSEDKANILDKDEHFYLVFEECYFELANIVPLYNKIRNYITQKPYSDEKFKLNFENSTLANGWDKNKEPDNTAILFIKDDKYYLGVMNKKNNKIFDDKAIKENKGEGYKKIVYKLLPGANKMLPKVFFSAKSIKFYNPSEDILRIRNHSTHTKNGSPQKGYEKFEFNIEDCRKFIDFYKQSISKHPEWKDFGFRFSDTQRYNSIDEFYREVENQGYKLTFENISESYIDSVVNQGKLYLFQIYNKDFSAYSKGRPNLHTLYWKALFDERNLQDVVYKLNGEAELFYRKQSIPKKITHPAKEAIANKNKDNPKKESVFEYDLIKDKRFTEDKFFFHCPITINFKSSGANKFNDEINLLLKEKANDVHILSIDRGERHLAYYTLVDGKGNIIKQDTFNIIGNDRMKTNYHDKLAAIEKDRDSARKDWKKINNIKEMKEGYLSQVVHEIAKLVIEYNAIVVFEDLNFGFKRGRFKVEKQVYQKLEKMLIEKLNYLVFKDNEFDKTGGVLRAYQLTAPFETFKKMGKQTGIIYYVPAGFTSKICPVTGFVNQLYPKYESVSKSQEFFSKFDKICYNLDKGYFEFSFDYKNFGDKAAKGKWTIASFGSRLINFRNSDKNHNWDTREVYPTKELEKLLKDYSIEYGHGECIKAAICGESDKKFFAKLTSVLNTILQMRNSKTGTELDYLISPVADVNGNFFDSRQAPKNMPQDAAANGAYHIGLKGLMLLGRIKNNQEGKKLNLVIKNEEYFEFVQNRNN

SEQ ID NO: 214 - protein, 1300 aa, Francisella tularensis
  REGION 1..1300: note = MISC_FEATURE - Cpf1 D917A/E1006A polypeptide sequence
  source 1..1300: note = subspecies novicida
MSIYQEFVNKYSLSKTLRFELIPQGKTLENIKARGLILDDEKRAKDYKKAKQIIDKYHQFFIEEILSSVCISEDLLQNYSDVYFKLKKSDDDNLQKDFKSAKDTIKKQISEYIKDSEKFKNLFNQNLIDAKKGQESDLILWLKQSKDNGIELFKANSDITDIDEALEIIKSFKGWTTYFKGFHENRKNVYSSNDIPTSIIYRIVDDNLPKFLENKAKYESLKDKAPEAINYEQIKKDLAEELTFDIDYKTSEVNQRVFSLDEVFEIANFNNYLNQSGITKFNTIIGGKFVNGENTKRKGINEYINLYSQQINDKTLKKYKMSVLFKQILSDTESKSFVIDKLEDDSDVVTTMQSFYEQIAAFKTVEEKSIKETLSLLFDDLKAQKLDLSKIYFKNDKSLTDLSQQVFDDYSVIGTAVLEYITQQIAPKNLDNPSKKEQELIAKKTEKAKYLSLETIKLALEEFNKHRDIDKQCRFEEILANFAAIPMIFDEIAQNKDNLAQISIKYQNQGKKDLLQASAEDDVKAIKDLLDQTNNLLHKLKIFHISQSEDKANILDKDEHFYLVFEECYFELANIVPLYNKIRNYITQKPYSDEKFKLNFENSTLANGWDKNKEPDNTAILFIKDDKYYLGVMNKKNNKIFDDKAIKENKGEGYKKIVYKLLPGANKMLPKVFFSAKSIKFYNPSEDILRIRNHSTHTKNGSPQKGYEKFEFNIEDCRKFIDFYKQSISKHPEWKDFGFRFSDTQRYNSIDEFYREVENQGYKLTFENISESYIDSVVNQGKLYLFQIYNKDFSAYSKGRPNLHTLYWKALFDERNLQDVVYKLNGEAELFYRKQSIPKKITHPAKEAIANKNKDNPKKESVFEYDLIKDKRFTEDKFFFHCPITINFKSSGANKFNDEINLLLKEKANDVHILSIARGERHLAYYTLVDGKGNIIKQDTFNIIGNDRMKTNYHDKLAAIEKDRDSARKDWKKINNIKEMKEGYLSQVVHEIAKLVIEYNAIVVFADLNFGFKRGRFKVEKQVYQKLEKMLIEKLNYLVFKDNEFDKTGGVLRAYQLTAPFETFKKMGKQTGIIYYVPAGFTSKICPVTGFVNQLYPKYESVSKSQEFFSKFDKICYNLDKGYFEFSFDYKNFGDKAAKGKWTIASFGSRLINFRNSDKNHNWDTREVYPTKELEKLLKDYSIEYGHGECIKAAICGESDKKFFAKLTSVLNTILQMRNSKTGTELDYLISPVADVNGNFFDSRQAPKNMPQDADANGAYHIGLKGLMLLGRIKNNQEGKKLNLVIKNEEYFEFVQNRNN

SEQ ID NO: 215 - protein, 1300 aa, Francisella tularensis
  REGION 1..1300: note = MISC_FEATURE - Cpf1 D917A/D1255A polypeptide sequence
  source 1..1300: note = subspecies novicida
MSIYQEFVNKYSLSKTLRFELIPQGKTLENIKARGLILDDEKRAKDYKKAKQIIDKYHQFFIEEILSSVCISEDLLQNYSDVYFKLKKSDDDNLQKDFKSAKDTIKKQISEYIKDSEKFKNLFNQNLIDAKKGQESDLILWLKQSKDNGIELFKANSDITDIDEALEIIKSFKGWTTYFKGFHENRKNVYSSNDIPTSIIYRIVDDNLPKFLENKAKYESLKDKAPEAINYEQIKKDLAEELTFDIDYKTSEVNQRVFSLDEVFEIANFNNYLNQSGITKFNTIIGGKFVNGENTKRKGINEYINLYSQQINDKTLKKYKMSVLFKQILSDTESKSFVIDKLEDDSDVVTTMQSFYEQIAAFKTVEEKSIKETLSLLFDDLKAQKLDLSKIYFKNDKSLTDLSQQVFDDYSVIGTAVLEYITQQIAPKNLDNPSKKEQELIAKKTEKAKYLSLETIKLALEEFNKHRDIDKQCRFEEILANFAAIPMIFDEIAQNKDNLAQISIKYQNQGKKDLLQASAEDDVKAIKDLLDQTNNLLHKLKIFHISQSEDKANILDKDEHFYLVFEECYFELANIVPLYNKIRNYITQKPYSDEKFKLNFENSTLANGWDKNKEPDNTAILFIKDDKYYLGVMNKKNNKIFDDKAIKENKGEGYKKIVYKLLPGANKMLPKVFFSAKSIKFYNPSEDILRIRNHSTHTKNGSPQKGYEKFEFNIEDCRKFIDFYKQSISKHPEWKDFGFRFSDTQRYNSIDEFYREVENQGYKLTFENISESYIDSVVNQGKLYLFQIYNKDFSAYSKGRPNLHTLYWKALFDERNLQDVVYKLNGEAELFYRKQSIPKKITHPAKEAIANKNKDNPKKESVFEYDLIKDKRFTEDKFFFHCPITINFKSSGANKFNDEINLLLKEKANDVHILSIARGERHLAYYTLVDGKGNIIKQDTFNIIGNDRMKTNYHDKLAAIEKDRDSARKDWKKINNIKEMKEGYLSQVVHEIAKLVIEYNAIVVFEDLNFGFKRGRFKVEKQVYQKLEKMLIEKLNYLVFKDNEFDKTGGVLRAYQLTAPFETFKKMGKQTGIIYYVPAGFTSKICPVTGFVNQLYPKYESVSKSQEFFSKFDKICYNLDKGYFEFSFDYKNFGDKAAKGKWTIASFGSRLINFRNSDKNHNWDTREVYPTKELEKLLKDYSIEYGHGECIKAAICGESDKKFFAKLTSVLNTILQMRNSKTGTELDYLISPVADVNGNFFDSRQAPKNMPQDAAANGAYHIGLKGLMLLGRIKNNQEGKKLNLVIKNEEYFEFVQNRNN

SEQ ID NO: 216 - protein, 1300 aa, Francisella tularensis
  REGION 1..1300: note = MISC_FEATURE - Cpf1 E1006A/D1255A polypeptide sequence
  source 1..1300: note = subspecies novicida
MSIYQEFVNKYSLSKTLRFELIPQGKTLENIKARGLILDDEKRAKDYKKAKQIIDKYHQFFIEEILSSVCISEDLLQNYSDVYFKLKKSDDDNLQKDFKSAKDTIKKQISEYIKDSEKFKNLFNQNLIDAKKGQESDLILWLKQSKDNGIELFKANSDITDIDEALEIIKSFKGWTTYFKGFHENRKNVYSSNDIPTSIIYRIVDDNLPKFLENKAKYESLKDKAPEAINYEQIKKDLAEELTFDIDYKTSEVNQRVFSLDEVFEIANFNNYLNQSGITKFNTIIGGKFVNGENTKRKGINEYINLYSQQINDKTLKKYKMSVLFKQILSDTESKSFVIDKLEDDSDVVTTMQSFYEQIAAFKTVEEKSIKETLSLLFDDLKAQKLDLSKIYFKNDKSLTDLSQQVFDDYSVIGTAVLEYITQQIAPKNLDNPSKKEQELIAKKTEKAKYLSLETIKLALEEFNKHRDIDKQCRFEEILANFAAIPMIFDEIAQNKDNLAQISIKYQNQGKKDLLQASAEDDVKAIKDLLDQTNNLLHKLKIFHISQSEDKANILDKDEHFYLVFEECYFELANIVPLYNKIRNYITQKPYSDEKFKLNFENSTLANGWDKNKEPDNTAILFIKDDKYYLGVMNKKNNKIFDDKAIKENKGEGYKKIVYKLLPGANKMLPKVFFSAKSIKFYNPSEDILRIRNHSTHTKNGSPQKGYEKFEFNIEDCRKFIDFYKQSISKHPEWKDFGFRFSDTQRYNSIDEFYREVENQGYKLTFENISESYIDSVVNQGKLYLFQIYNKDFSAYSKGRPNLHTLYWKALFDERNLQDVVYKLNGEAELFYRKQSIPKKITHPAKEAIANKNKDNPKKESVFEYDLIKDKRFTEDKFFFHCPITINFKSSGANKFNDEINLLLKEKANDVHILSIDRGERHLAYYTLVDGKGNIIKQDTFNIIGNDRMKTNYHDKLAAIEKDRDSARKDWKKINNIKEMKEGYLSQVVHEIAKLVIEYNAIVVFADLNFGFKRGRFKVEKQVYQKLEKMLIEKLNYLVFKDNEFDKTGGVLRAYQLTAPFETFKKMGKQTGIIYYVPAGFTSKICPVTGFVNQLYPKYESVSKSQEFFSKFDKICYNLDKGYFEFSFDYKNFGDKAAKGKWTIASFGSRLINFRNSDKNHNWDTREVYPTKELEKLLKDYSIEYGHGECIKAAICGESDKKFFAKLTSVLNTILQMRNSKTGTELDYLISPVADVNGNFFDSRQAPKNMPQDAAANGAYHIGLKGLMLLGRIKNNQEGKKLNLVIKNEEYFEFVQNRNN

SEQ ID NO: 217 - protein, 1300 aa, Francisella tularensis
  REGION 1..1300: note = MISC_FEATURE - Cpf1 D917A/E1006A/D1255A polypeptide sequence
  source 1..1300: note = subspecies novicida
MSIYQEFVNKYSLSKTLRFELIPQGKTLENIKARGLILDDEKRAKDYKKAKQIIDKYHQFFIEEILSSVCISEDLLQNYSDVYFKLKKSDDDNLQKDFKSAKDTIKKQISEYIKDSEKFKNLFNQNLIDAKKGQESDLILWLKQSKDNGIELFKANSDITDIDEALEIIKSFKGWTTYFKGFHENRKNVYSSNDIPTSIIYRIVDDNLPKFLENKAKYESLKDKAPEAINYEQIKKDLAEELTFDIDYKTSEVNQRVFSLDEVFEIANFNNYLNQSGITKFNTIIGGKFVNGENTKRKGINEYINLYSQQINDKTLKKYKMSVLFKQILSDTESKSFVIDKLEDDSDVVTTMQSFYEQIAAFKTVEEKSIKETLSLLFDDLKAQKLDLSKIYFKNDKSLTDLSQQVFDDYSVIGTAVLEYITQQIAPKNLDNPSKKEQELIAKKTEKAKYLSLETIKLALEEFNKHRDIDKQCRFEEILANFAAIPMIFDEIAQNKDNLAQISIKYQNQGKKDLLQASAEDDVKAIKDLLDQTNNLLHKLKIFHISQSEDKANILDKDEHFYLVFEECYFELANIVPLYNKIRNYITQKPYSDEKFKLNFENSTLANGWDKNKEPDNTAILFIKDDKYYLGVMNKKNNKIFDDKAIKENKGEGYKKIVYKLLPGANKMLPKVFFSAKSIKFYNPSEDILRIRNHSTHTKNGSPQKGYEKFEFNIEDCRKFIDFYKQSISKHPEWKDFGFRFSDTQRYNSIDEFYREVENQGYKLTFENISESYIDSVVNQGKLYLFQIYNKDFSAYSKGRPNLHTLYWKALFDERNLQDVVYKLNGEAELFYRKQSIPKKITHPAKEAIANKNKDNPKKESVFEYDLIKDKRFTEDKFFFHCPITINFKSSGANKFNDEINLLLKEKANDVHILSIARGERHLAYYTLVDGKGNIIKQDTFNIIGNDRMKTNYHDKLAAIEKDRDSARKDWKKINNIKEMKEGYLSQVVHEIAKLVIEYNAIVVFADLNFGFKRGRFKVEKQVYQKLEKMLIEKLNYLVFKDNEFDKTGGVLRAYQLTAPFETFKKMGKQTGIIYYVPAGFTSKICPVTGFVNQLYPKYESVSKSQEFFSKFDKICYNLDKGYFEFSFDYKNFGDKAAKGKWTIASFGSRLINFRNSDKNHNWDTREVYPTKELEKLLKDYSIEYGHGECIKAAICGESDKKFFAKLTSVLNTILQMRNSKTGTELDYLISPVADVNGNFFDSRQAPKNMPQDAAANGAYHIGLKGLMLLGRIKNNQEGKKLNLVIKNEEYFEFVQNRNN

SEQ ID NO: 218 - protein, 1052 aa, Staphylococcus aureus
  REGION 1..1052: note = MISC_FEATURE - Exemplary SaCas9 polypeptide sequence
KRNYILGLDIGITSVGYGIIDYETRDVIDAGVRLFKEANVENNEGRRSKRGARRLKRRRRHRIQRVKKLLFDYNLLTDHSELSGINPYEARVKGLSQKLSEEEFSAALLHLAKRRGVHNVNEVEEDTGNELSTKEQISRNSKALEEKYVAELQLERLKKDGEVRGSINRFKTSDYVKEAKQLLKVQKAYHQLDQSFIDTYIDLLETRRTYYEGPGEGSPFGWKDIKEWYEMLMGHCTYFPEELRSVKYAYNADLYNALNDLNNLVITRDENEKLEYYEKFQIIENVFKQKKKPTLKQIAKEILVNEEDIKGYRVTSTGKPEFTNLKVYHDIKDITARKEIIENAELLDQIAKILTIYQSSEDIQEELTNLNSELTQEEIEQISNLKGYTGTHNLSLKAINLILDELWHTNDNQIAIFNRLKLVPKKVDLSQQKEIPTTLVDDFILSPVVKRSFIQSIKVINAIIKKYGLPNDIIIELAREKNSKDAQKMINEMQKRNRQTNERIEEIIRTTGKENAKYLIEKIKLHDMQEGKCLYSLEAIPLEDLLNNPFNYEVDHIIPRSVSFDNSFNNKVLVKQEENSKKGNRTPFQYLSSSDSKISYETFKKHILNLAKGKGRISKTKKEYLLEERDINRFSVQKDFINRNLVDTRYATRGLMNLLRSYFRVNNLDVKVKSINGGFTSFLRRKWKFKKERNKGYKHHAEDALIIANADFIFKEWKKLDKAKKVMENQMFEEKQAESMPEIETEQEYKEIFITPHQIKHIKDFKDYKYSHRVDKKPNRELINDTLYSTRKDDKGNTLIVNNLNGLYDKDNDKLKKLINKSPEKLLMYHHDPQTYQKLKLIMEQYGDEKNPLYKYYEETGNYLTKYSKKDNGPVIKKIKYYGNKLNAHLDITDDYPNSRNKVVKLSLKPYRFDVYLDNGVYKFVTVKNLDVIKKENYYEVNSKCYEEAKKLKKISNQAEFIASFYNNDLIKINGELYRVIGVNNDLLNRIEVNMIDITYREYLENMNDKRPPRIIKTIASKTQSIKKYSTDILGNLYEVKSKKHPQIIKKG

SEQ ID NO: 219 - protein, 1052 aa, Staphylococcus aureus
  REGION 1..1052: note = MISC_FEATURE - SaCas9n polypeptide sequence
KRNYILGLDIGITSVGYGIIDYETRDVIDAGVRLFKEANVENNEGRRSKRGARRLKRRRRHRIQRVKKLLFDYNLLTDHSELSGINPYEARVKGLSQKLSEEEFSAALLHLAKRRGVHNVNEVEEDTGNELSTKEQISRNSKALEEKYVAELQLERLKKDGEVRGSINRFKTSDYVKEAKQLLKVQKAYHQLDQSFIDTYIDLLETRRTYYEGPGEGSPFGWKDIKEWYEMLMGHCTYFPEELRSVKYAYNADLYNALNDLNNLVITRDENEKLEYYEKFQIIENVFKQKKKPTLKQIAKEILVNEEDIKGYRVTSTGKPEFTNLKVYHDIKDITARKEIIENAELLDQIAKILTIYQSSEDIQEELTNLNSELTQEEIEQISNLKGYTGTHNLSLKAINLILDELWHTNDNQIAIFNRLKLVPKKVDLSQQKEIPTTLVDDFILSPVVKRSFIQSIKVINAIIKKYGLPNDIIIELAREKNSKDAQKMINEMQKRNRQTNERIEEIIRTTGKENAKYLIEKIKLHDMQEGKCLYSLEAIPLEDLLNNPFNYEVDHIIPRSVSFDNSFNNKVLVKQEEASKKGNRTPFQYLSSSDSKISYETFKKHILNLAKGKGRISKTKKEYLLEERDINRFSVQKDFINRNLVDTRYATRGLMNLLRSYFRVNNLDVKVKSINGGFTSFLRRKWKFKKERNKGYKHHAEDALIIANADFIFKEWKKLDKAKKVMENQMFEEKQAESMPEIETEQEYKEIFITPHQIKHIKDFKDYKYSHRVDKKPNRELINDTLYSTRKDDKGNTLIVNNLNGLYDKDNDKLKKLINKSPEKLLMYHHDPQTYQKLKLIMEQYGDEKNPLYKYYEETGNYLTKYSKKDNGPVIKKIKYYGNKLNAHLDITDDYPNSRNKVVKLSLKPYRFDVYLDNGVYKFVTVKNLDVIKKENYYEVNSKCYEEAKKLKKISNQAEFIASFYNNDLIKINGELYRVIGVNNDLLNRIEVNMIDITYREYLENMNDKRPPRIIKTIASKTQSIKKYSTDILGNLYEVKSKKHPQIIKKG

SEQ ID NO: 220 - protein, 1052 aa, Staphylococcus aureus
  REGION 1..1052: note = MISC_FEATURE - SaKKH Cas9 polypeptide sequence
KRNYILGLDIGITSVGYGIIDYETRDVIDAGVRLFKEANVENNEGRRSKRGARRLKRRRRHRIQRVKKLLFDYNLLTDHSELSGINPYEARVKGLSQKLSEEEFSAALLHLAKRRGVHNVNEVEEDTGNELSTKEQISRNSKALEEKYVAELQLERLKKDGEVRGSINRFKTSDYVKEAKQLLKVQKAYHQLDQSFIDTYIDLLETRRTYYEGPGEGSPFGWKDIKEWYEMLMGHCTYFPEELRSVKYAYNADLYNALNDLNNLVITRDENEKLEYYEKFQIIENVFKQKKKPTLKQIAKEILVNEEDIKGYRVTSTGKPEFTNLKVYHDIKDITARKEIIENAELLDQIAKILTIYQSSEDIQEELTNLNSELTQEEIEQISNLKGYTGTHNLSLKAINLILDELWHTNDNQIAIFNRLKLVPKKVDLSQQKEIPTTLVDDFILSPVVKRSFIQSIKVINAIIKKYGLPNDIIIELAREKNSKDAQKMINEMQKRNRQTNERIEEIIRTTGKENAKYLIEKIKLHDMQEGKCLYSLEAIPLEDLLNNPFNYEVDHIIPRSVSFDNSFNNKVLVKQEEASKKGNRTPFQYLSSSDSKISYETFKKHILNLAKGKGRISKTKKEYLLEERDINRFSVQKDFINRNLVDTRYATRGLMNLLRSYFRVNNLDVKVKSINGGFTSFLRRKWKFKKERNKGYKHHAEDALIIANADFIFKEWKKLDKAKKVMENQMFEEKQAESMPEIETEQEYKEIFITPHQIKHIKDFKDYKYSHRVDKKPNRKLINDTLYSTRKDDKGNTLIVNNLNGLYDKDNDKLKKLINKSPEKLLMYHHDPQTYQKLKLIMEQYGDEKNPLYKYYEETGNYLTKYSKKDNGPVIKKIKYYGNKLNAHLDITDDYPNSRNKVVKLSLKPYRFDVYLDNGVYKFVTVKNLDVIKKENYYEVNSKCYEEAKKLKKISNQAEFIASFYKNDLIKINGELYRVIGVNNDLLNRIEVNMIDITYREYLENMNDKRPPHIIKTIASKTQSIKKYSTDILGNLYEVKSKKHPQIIKKG

SEQ ID NO: 221 - protein, 707 aa, synthetic construct
  REGION 1..707: note = Casphi-1 polypeptide sequence
MADTPTLFTQFLRHHLPGQRFRKDILKQAGRILANKGEDATIAFLRGKSEESPPDFQPPVKCPIIACSRPLTEWPIYQASVAIQGYVYGQSLAEFEASDPGCSKDGLLGWFDKTGVCTDYFSVQGLNLIFQNARKRYIGVQTKVTNRNEKRHKKLKRINAKRIAEGLPELTSDEPESALDETGHLIDPPGLNTNIYCYQQVSPKPLALSEVNQLPTAYAGYSTSGDDPIQPMVTKDRLSISKGQPGYIPEHQRALLSQKKHRRMRGYGLKARALLVIVRIQDDWAVIDLRSLLRNAYWRRIVQTKEPSTITKLLKLVTGDPVLDATRMVATFTYKPGIVQVRSAKCLKNKQGSKLFSERYLNETVSVTSIDLGSNNLVAVATYRLVNGNTPELLQRFTLPSHLVKDFERYKQAHDTLEDSIQKTAVASLPQGQQTEIRMWSMYGFREAQERVCQELGLADGSIPWNVMTATSTILTDLFLARGGDPKKCMFTSEPKKKKNSKQVLYKIRDRAWAKMYRTLLSKETREAWNKALWGLKRGSPDYARLSKRKEELARRCVNYTISTAEKRAQCGRTIVALEDLNIGFFHGRGKQEPGWVGLFTRKKENRWLMQALHKAFLELAHHRGYHVIEVNPAYTSQTCPVCRHCDPDNRDQHNREAFHCIGCGFRGNADLDVATHNIAMVAITGESLKRARGSVASKTPQPLAAE

SEQ ID NO: 222 - protein, 757 aa, synthetic construct
  REGION 1..757: note = Casphi-2 polypeptide sequence
MPKPAVESEFSKVLKKHFPGERFRSSYMKRGGKILAAQGEEAVVAYLQGKSEEEPPNFQPPAKCHVVTKSRDFAEWPIMKASEAIQRYIYALSTTERAACKPGKSSESHAAWFAATGVSNHGYSHVQGLNLIFDHTLGRYDGVLKKVQLRNEKARARLESINASRADEGLPEIKAEEEEVATNETGHLLQPPGINPSFYVYQTISPQAYRPRDEIVLPPEYAGYVRDPNAPIPLGVVRNRCDIQKGCPGYIPEWQREAGTAISPKTGKAVTVPGLSPKKNKRMRRYWRSEKEKAQDALLVTVRIGTDWVVIDVRGLLRNARWRTIAPKDISLNALLDLFTGDPVIDVRRNIVTFTYTLDACGTYARKWTLKGKQTKATLDKLTATQTVALVAIDLGQTNPISAGISRVTQENGALQCEPLDRFTLPDDLLKDISAYRIAWDRNEEELRARSVEALPEAQQAEVRALDGVSKETARTQLCADFGLDPKRLPWDKMSSNTTFISEALLSNSVSRDQVFFTPAPKKGAKKKAPVEVMRKDRTWARAYKPRLSVEAQKLKNEALWALKRTSPEYLKLSRRKEELCRRSINYVIEKTRRRTQCQIVIPVIEDLNVRFFHGSGKRLPGWDNFFTAKKENRWFIQGLHKAFSDLRTHRSFYVFEVRPERTSITCPKCGHCEVGNRDGEAFQCLSCGKTCNADLDVATHNLTQVALTGKTMPKREEPRDAQGTAPARKTKKASKSKAPPAEREDQTPAQEPSQTS

SEQ ID NO: 223 - protein, 766 aa, synthetic construct
  REGION 1..766: note = Casphi-3 polypeptide sequence
MEKEITELTKIRREFPNKKFSSTDMKKAGKLLKAEGPDAVRDFLNSCQEIIGDFKPPVKTNIVSISRPFEEWPVSMVGRAIQEYYFSLTKEELESVHPGTSSEDHKSFFNITGLSNYNYTSVQGLNLIFKNAKAIYDGTLVKANNKNKKLEKKFNEINHKRSLEGLPIITPDFEEPFDENGHLNNPPGINRNIYGYQGCAAKVFVPSKHKMVSLPKEYEGYNRDPNLSLAGFRNRLEIPEGEPGHVPWFQRMDIPEGQIGHVNKIQRFNFVHGKNSGKVKFSDKTGRVKRYHHSKYKDATKPYKFLEESKKVSALDSILAIITIGDDWVVFDIRGLYRNVFYRELAQKGLTAVQLLDLFTGDPVIDPKKGVVTFSYKEGVVPVFSQKIVPRFKSRDTLEKLTSQGPVALLSVDLGQNEPVAARVCSLKNINDKITLDNSCRISFLDDYKKQIKDYRDSLDELEIKIRLEAINSLETNQQVEIRDLDVFSADRAKANTVDMFDIDPNLISWDSMSDARVSTQISDLYLKNGGDESRVYFEINNKRIKRSDYNISQLVRPKLSDSTRKNLNDSIWKLKRTSEEYLKLSKRKLELSRAVVNYTIRQSKLLSGINDIVIILEDLDVKKKFNGRGIRDIGWDNFFSSRKENRWFIPAFHKAFSELSSNRGLCVIEVNPAWTSATCPDCGFCSKENRDGINFTCRKCGVSYHADIDVATLNIARVAVLGKPMSGPADRERLGDTKKPRVARSRKTMKRKDISNSTVEAMVTA

SEQ ID NO: 224 - protein, 765 aa, synthetic construct
  REGION 1..765: note = Casphi-4 polypeptide sequence
MYSLEMADLKSEPSLLAKLLRDRFPGKYWLPKYWKLAEKKRLTGGEEAACEYMADKQLDSPPPNFRPPARCVILAKSRPFEDWPVHRVASKAQSFVIGLSEQGFAALRAAPPSTADARRDWLRSHGASEDDLMALEAQLLETIMGNAISLHGGVLKKIDNANVKAAKRLSGRNEARLNKGLQELPPEQEGSAYGADGLLVNPPGLNLNIYCRKSCCPKPVKNTARFVGHYPGYLRDSDSILISGTMDRLTIIEGMPGHIPAWQREQGLVKPGGRRRRLSGSESNMRQKVDPSTGPRRSTRSGTVNRSNQRTGRNGDPLLVEIRMKEDWVLLDARGLLRNLRWRESKRGLSCDHEDLSLSGLLALFSGDPVIDPVRNEVVFLYGEGIIPVRSTKPVGTRQSKKLLERQASMGPLTLISCDLGQTNLIAGRASAISLTHGSLGVRSSVRIELDPEIIKSFERLRKDADRLETEILTAAKETLSDEQRGEVNSHEKDSPQTAKASLCRELGLHPPSLPWGQMGPSTTFIADMLISHGRDDDAFLSHGEFPTLEKRKKFDKRFCLESRPLLSSETRKALNESLWEVKRTSSEYARLSQRKKEMARRAVNFVVEISRRKTGLSNVIVNIEDLNVRIFHGGGKQAPGWDGFFRPKSENRWFIQAIHKAFSDLAAHHGIPVIESDPQRTSMTCPECGHCDSKNRNGVRFLCKGCGASMDADFDAACRNLERVALTGKPMPKPSTSCERLLSATTGKVCSDHSLSHDAIEKAS

SEQ ID NO: 225 - protein, 793 aa, synthetic construct
  REGION 1..793: note = Casphi-5 polypeptide sequence
MSSLPTPLELLKQKHADLFKGLQFSSKDNKMAGKVLKKDGEEAALAFLSERGVSRGELPNFRPPAKTLVVAQSRPFEEFPIYRVSEAIQLYVYSLSVKELETVPSGSSTKKEHQRFFQDSSVPDFGYTSVQGLNKIFGLARGIYLGVITRGENQLQKAKSKHEALNKKRRASGEAETEFDPTPYEYMTPERKLAKPPGVNHSIMCYVDISVDEFDFRNPDGIVLPSEYAGYCREINTAIEKGTVDRLGHLKGGPGYIPGHQRKESTTEGPKINFRKGRIRRSYTALYAKRDSRRVRQGKLALPSYRHHMMRLNSNAESAILAVIFFGKDWVVFDLRGLLRNVRWRNLFVDGSTPSTLLGMFGDPVIDPKRGVVAFCYKEQIVPVVSKSITKMVKAPELLNKLYLKSEDPLVLVAIDLGQTNPVGVGVYRVMNASLDYEVVTRFALESELLREIESYRQRTNAFEAQIRAETFDAMTSEEQEEITRVRAFSASKAKENVCHRFGMPVDAVDWATMGSNTIHIAKWVMRHGDPSLVEVLEYRKDNEIKLDKNGVPKKVKLTDKRIANLTSIRLRFSQETSKHYNDTMWELRRKHPVYQKLSKSKADFSRRVVNSIIRRVNHLVPRARIVFIIEDLKNLGKVFHGSGKRELGWDSYFEPKSENRWFIQVLHKAFSETGKHKGYYIIECWPNWTSCTCPKCSCCDSENRHGEVFRCLACGYTCNTDFGTAPDNLVKIATTGKGLPGPKKRCKGSSKGKNPKIARSSETGVSVTESGAPKVKKSSPTQTSQSSSQSAP

SEQ ID NO: 226 - protein, 441 aa, synthetic construct
  REGION 1..441: note = Casphi-6 polypeptide sequence
MNKIEKEKTPLAKLMNENFAGLRFPFAIIKQAGKKLLKEGELKTIEYMTGKGSIEPLPNFKPPVKCLIVAKRRDLKYFPICKASCEIQSYVYSLNYKDFMDYFSTPMTSQKQHEEFFKKSGLNIEYQNVAGLNLIFNNVKNTYNGVILKVKNRNEKLKKKAIKNNYEFEEIKTFNDDGCLINKPGINNVIYCFQSISPKILKNITHLPKEYNDYDCSVDRNIIQKYVSRLDIPESQPGHVPEWQRKLPEFNNTNNPRRRRKWYSNGRNISKGYSVDQVNQAKIEDSLLAQIKIGEDWIILDIRGLLRDLNRRELISYKNKLTIKDVLGFFSDYPIIDIKKNLVTFCYKEGVIQVVSQKSIGNKKSKQLLEKLIENKPIALVSIDLGQTNPVSVKISKLNKINNKISIESFTYRFLNEEILKEIEKYRKDYDKLELKLINEA

SEQ ID NO: 227 - protein, 772 aa, synthetic construct
  REGION 1..772: note = Casphi-7 polypeptide sequence
MSNTAVSTREHMSNKTTPPSPLSLLLRAHFPGLKFESQDYKIAGKKLRDGGPEAVISYLTGKGQAKLKDVKPPAKAFVIAQSRPFIEWDLVRVSRQIQEKIFGIPATKGRPKQDGLSETAFNEAVASLEVDGKSKLNEETRAAFYEVLGLDAPSLHAQAQNALIKSAISIREGVLKKVENRNEKNLSKTKRRKEAGEEATFVEEKAHDERGYLIHPPGVNQTIPGYQAVVIKSCPSDFIGLPSGCLAKESAEALTDYLPHDRMTIPKGQPGYVPEWQHPLLNRRKNRRRRDWYSASLNKPKATCSKRSGTPNRKNSRTDQIQSGRFKGAIPVLMRFQDEWVIIDIRGLLRNARYRKLLKEKSTIPDLLSLFTGDPSIDMRQGVCTFIYKAGQACSAKMVKTKNAPEILSELTKSGPVVLVSIDLGQTNPIAAKVSRVTQLSDGQLSHETLLRELLSNDSSDGKEIARYRVASDRLRDKLANLAVERLSPEHKSEILRAKNDTPALCKARVCAALGLNPEMIAWDKMTPYTEFLATAYLEKGGDRKVATLKPKNRPEMLRRDIKFKGTEGVRIEVSPEAAEAYREAQWDLQRTSPEYLRLSTWKQELTKRILNQLRHKAAKSSQCEVVVMAFEDLNIKMMHGNGKWADGGWDAFFIKKRENRWFMQAFHKSLTELGAHKGVPTIEVTPHRTSITCTKCGHCDKANRDGERFACQKCGFVAHADLEIATDNIERVALTGKPMPKPESERSGDAKKSVGARKAAFKPEEDAEAAE

SEQ ID NO: 228 - protein, 717 aa, synthetic construct
  REGION 1..717: note = Casphi-8 polypeptide sequence
MIKPTVSQFLTPGFKLIRNHSRTAGLKLKNEGEEACKKFVRENEIPKDECPNFQGGPAIANIIAKSREFTEWEIYQSSLAIQEVIFTLPKDKLPEPILKEEWRAQWLSEHGLDTVPYKEAAGLNLIIKNAVNTYKGVQVKVDNKNKNNLAKINRKNEIAKLNGEQEISFEEIKAFDDKGYLLQKPSPNKSIYCYQSVSPKPFITSKYHNVNLPEEYIGYYRKSNEPIVSPYQFDRLRIPIGEPGYVPKWQYTFLSKKENKRRKLSKRIKNVSPILGIICIKKDWCVFDMRGLLRTNHWKKYHKPTDSINDLFDYFTGDPVIDTKANVVRFRYKMENGIVNYKPVREKKGKELLENICDQNGSCKLATVDVGQNNPVAIGLFELKKVNGELTKTLISRHPTPIDFCNKITAYRERYDKLESSIKLDAIKQLTSEQKIEVDNYNNNFTPQNTKQIVCSKLNINPNDLPWDKMISGTHFISEKAQVSNKSEIYFTSTDKGKTKDVMKSDYKWFQDYKPKLSKEVRDALSDIEWRLRRESLEFNKLSKSREQDARQLANWISSMCDVIGIENLVKKNNFFGGSGKREPGWDNFYKPKKENRWWINAIHKALTELSQNKGKRVILLPAMRTSITCPKCKYCDSKNRNGEKFNCLKCGIELNADIDVATENLATVAITAQSMPKPTCERSGDAKKPVRARKAKAPEFHDKLAPSYTVVLREAV

SEQ ID NO: 229 - protein, 793 aa, synthetic construct
  REGION 1..793: note = Casphi-9 polypeptide sequence
MRSSREIGDKILMRQPAEKTAFQVFRQEVIGTQKLSGGDAKTAGRLYKQGKMEAAREWLLKGARDDVPPNFQPPAKCLVVAVSHPFEEWDISKTNHDVQAYIYAQPLQAEGHLNGLSEKWEDTSADQHKLWFEKTGVPDRGLPVQAINKIAKAAVNRAFGVVRKVENRNEKRRSRDNRIAEHNRENGLTEVVREAPEVATNADGFLLHPPGIDPSILSYASVSPVPYNSSKHSFVRLPEEYQAYNVEPDAPIPQFVVEDRFAIPPGQPGYVPEWQRLKCSTNKHRRMRQWSNQDYKPKAGRRAKPLEFQAHLTRERAKGALLVVMRIKEDWVVFDVRGLLRNVEWRKVLSEEAREKLTLKGLLDLFTGDPVIDTKRGIVTFLYKAEITKILSKRTVKTKNARDLLLRLTEPGEDGLRREVGLVAVDLGQTHPIAAAIYRIGRTSAGALESTVLHRQGLREDQKEKLKEYRKRHTALDSRLRKEAFETLSVEQQKEIVTVSGSGAQITKDKVCNYLGVDPSTLPWEKMGSYTHFISDDFLRRGGDPNIVHFDRQPKKGKVSKKSQRIKRSDSQWVGRMRPRLSQETAKARMEADWAAQNENEEYKRLARSKQELARWCVNTLLQNTRCITQCDEIVVVIEDLNVKSLHGKGAREPGWDNFFTPKTENRWFIQILHKTFSELPKHRGEHVIEGCPLRTSITCPACSYCDKNSRNGEKFVCVACGATFHADFEVATYNLVRLATTGMPMPKSLERQGGGEKAGGARKARKKAKQVEKIVVQANANVTMNGASLHSP

SEQ ID NO: 230 - protein, 812 aa, synthetic construct
  REGION 1..812: note = Casphi-10 polypeptide sequence
MDMLDTETNYATETPAQQQDYSPKPPKKAQRAPKGFSKKARPEKKPPKPITLFTQKHFSGVRFLKRVIRDASKILKLSESRTITFLEQAIERDGSAPPDVTPPVHNTIMAVTRPFEEWPEVILSKALQKHCYALTKKIKIKTWPKKGPGKKCLAAWSARTKIPLIPGQVQATNGLFDRIGSIYDGVEKKVTNRNANKKLEYDEAIKEGRNPAVPEYETAYNIDGTLINKPGYNPNLYITQSRTPRLITEADRPLVEKILWQMVEKKTQSRNQARRARLEKAAHLQGLPVPKFVPEKVDRSQKIEIRIIDPLDKIEPYMPQDRMAIKASQDGHVPYWQRPFLSKRRNRRVRAGWGKQVSSIQAWLTGALLVIVRLGNEAFLADIRGALRNAQWRKLLKPDATYQSLFNLFTGDPVVNTRTNHLTMAYREGVVNIVKSRSFKGRQTREHLLTLLGQGKTVAGVSFDLGQKHAAGLLAAHFGLGEDGNPVFTPIQACFLPQRYLDSLTNYRNRYDALTLDMRRQSLLALTPAQQQEFADAQRDPGGQAKRACCLKLNLNPDEIRWDLVSGISTMISDLYIERGGDPRDVHQQVETKPKGKRKSEIRILKIRDGKWAYDFRPKIADETRKAQREQLWKLQKASSEFERLSRYKINIARAIANWALQWGRELSGCDIVIPVLEDLNVGSKFFDGKGKWLLGWDNRFTPKKENRWFIKVLHKAVAELAPHRGVPVYEVMPHRTSMTCPACHYCHPTNREGDRFECQSCHVVKNTDRDVAPYNILRVAVEGKTLDRWQAEKKPQAEPDRPMILIDNQES

SEQ ID NO: 231 - protein, 84 aa, synthetic construct
  REGION 1..84: note = synthetic polypeptide sequence
MTNLSDIIEKETGKQLVIQESILMLPEEVEEVIGNKPESDILVHTAYDESTDENVMLLTSDAPEYKPWALVIQDSNGENKIKML

SEQ ID NO: 232 - protein, 1129 aa, Alicyclobacillus acidoterrestris
  REGION 1..1129: note = MISC_FEATURE - Cas12b/C2c1; sp|T0D7A2|C2C1_ALIAG CRISPR-associated endonuclease C2c1 OS = Alicyclobacillus acido-terrestris (strain ATCC 49025 /DSM 3922/ CIP 106132 / NCIMB 13137/GD3B) GN=c2c1 PE=1 SV=1; Cas12b/C2c1 polypeptide sequence
MAVKSIKVKLRLDDMPEIRAGLWKLHKEVNAGVRYYTEWLSLLRQENLYRRSPNGDGEQECDKTAEECKAELLERLRARQVENGHRGPAGSDDELLQLARQLYELLVPQAIGAKGDAQQIARKFLSPLADKDAVGGLGIAKAGNKPRWVRMREAGEPGWEEEKEKAETRKSADRTADVLRALADFGLKPLMRVYTDSEMSSVEWKPLRKGQAVRTWDRDMFQQAIERMMSWESWNQRVGQEYAKLVEQKNRFEQKNFVGQEHLVHLVNQLQQDMKEASPGLESKEQTAHYVTGRALRGSDKVFEKWGKLAPDAPFDLYDAEIKNVQRRNTRRFGSHDLFAKLAEPEYQALWREDASFLTRYAVYNSILRKLNHAKMFATFTLPDATAHPIWTRFDKLGGNLHQYTFLFNEFGERRHAIRFHKLLKVENGVAREVDDVTVPISMSEQLDNLLPRDPNEPIALYFRDYGAEQHFTGEFGGAKIQCRRDQLAHMHRRRGARDVYLNVSVRVQSQSEARGERRPPYAAVFRLVGDNHRAFVHFDKLSDYLAEHPDDGKLGSEGLLSGLRVMSVDLGLRTSASISVFRVARKDELKPNSKGRVPFFFPIKGNDNLVAVHERSQLLKLPGETESKDLRAIREERQRTLRQLRTQLAYLRLLVRCGSEDVGRRERSWAKLIEQPVDAANHMTPDWREAFENELQKLKSLHGICSDKEWMDAVYESVRRVWRHMGKQVRDWRKDVRSGERPKIRGYAKDVVGGNSIEQIEYLERQYKFLKSWSFFGKVSGQVIRAEKGSRFAITLREHIDHAKEDRLKKLADRIIMEALGYVYALDERGKGKWVAKYPPCQLILLEELSEYQFNNDRPPSENNQLMQWSHRGVFQELINQAQVHDLLVGTMYAAFSSRFDARTGAPGIRCRRVPARCTQEHNPEPFPWWLNKFVVEHTLDACPLRADDLIPTGEGEIFVSPFSAEEGDFHQIHADLNAAQNLQQRLWSDFDISQIRLRCDWGEVDGELVLIPRLTGKRTADSYSNKVFYTNTGVTYYERERGKKRRKVFAQEKLSEEEAELLVEADEAREKSVVLMRDPSGIINRGNWTRQKEFWSMVNQRIEGYLVKQIRSRVPLQDSACENTGDI

SEQ ID NO: 233 - protein, 1368 aa, Mus musculus
  REGION 1..1368: note = MISC_FEATURE - high fidelity Cas9 polypeptide sequence
MDKKYSIGLAIGTNSVGWAVITDEYKVPSKKFKVLGNTDRHSIKKNLIGALLFDSGETAEATRLKRTARRRYTRRKNRICYLQEIFSNEMAKVDDSFFHRLEESFLVEEDKKHERHPIFGNIVDEVAYHEKYPTIYHLRKKLVDSTDKADLRLIYLALAHMIKFRGHFLIEGDLNPDNSDVDKLFIQLVQTYNQLFEENPINASGVDAKAILSARLSKSRRLENLIAQLPGEKKNGLFGNLIALSLGLTPNFKSNFDLAEDAKLQLSKDTYDDDLDNLLAQIGDQYADLFLAAKNLSDAILLSDILRVNTEITKAPLSASMIKRYDEHHQDLTLLKALVRQQLPEKYKEIFFDQSKNGYAGYIDGGASQEEFYKFIKPILEKMDGTEELLVKLNREDLLRKQRTFDNGSIPHQIHLGELHAILRRQEDFYPFLKDNREKIEKILTFRIPYYVGPLARGNSRFAWMTRKSEETITPWNFEEVVDKGASAQSFIERMTAFDKNLPNEKVLPKHSLLYEYFTVYNELTKVKYVTEGMRKPAFLSGEQKKAIVDLLFKTNRKVTVKQLKEDYFKKIECFDSVEISGVEDRFNASLGTYHDLLKIIKDKDFLDNEENEDILEDIVLTLTLFEDREMIEERLKTYAHLFDDKVMKQLKRRRYTGWGALSRKLINGIRDKQSGKTILDFLKSDGFANRNFMALIHDDSLTFKEDIQKAQVSGQGDSLHEHIANLAGSPAIKKGILQTVKVVDELVKVMGRHKPENIVIEMARENQTTQKGQKNSRERMKRIEEGIKELGSQILKEHPVENTQLQNEKLYLYYLQNGRDMYVDQELDINRLSDYDVDHIVPQSFLKDDSIDNKVLTRSDKNRGKSDNVPSEEVVKKMKNYWRQLLNAKLITQRKFDNLTKAERGGLSELDKAGFIKRQLVETRAITKHVAQILDSRMNTKYDENDKLIREVKVITLKSKLVSDFRKDFQFYKVREINNYHHAHDAYLNAVVGTALIKKYPKLESEFVYGDYKVYDVRKMIAKSEQEIGKATAKYFFYSNIMNFFKTEITLANGEIRKRPLIETNGETGEIVWDKGRDFATVRKVLSMPQVNIVKKTEVQTGGFSKESILPKRNSDKLIARKKDWDPKKYGGFDSPTVAYSVLVVAKVEKGKSKKLKSVKELLGITIMERSSFEKNPIDFLEAKGYKEVKKDLIIKLPKYSLFELENGRKRMLASAGELQKGNELALPSKYVNFLYLASHYEKLKGSPEDNEQKQLFVEQHKHYLDEIIEQISEFSKRVILADANLDKVLSAYNKHRDKPIREQAENIIHLFTLTNLGAPAAFKYFDTTIDRKRYTSTKEVLDATLIHQSITGLYETRIDLSQLGGD

SEQ ID NO: 234 - protein, 1368 aa, Streptococcus pyogenes
  REGION 1..1368: note = MISC_FEATURE - PAM-binding SpEQR Cas9 polypeptide sequence
MDKKYSIGLAIGTNSVGWAVITDEYKVPSKKFKVLGNTDRHSIKKNLIGALLFDSGETAEATRLKRTARRRYTRRKNRICYLQEIFSNEMAKVDDSFFHRLEESVLVEEDKKHERHPIFGNIVDEVAYHEKYPTIYHLRKKLVDSTDKADLRLIYLALAHMIKFRGHFLIEGDLNPDNSDVDKLFIQLVQTYNQLFEENPINASGVDAKAILSARLSKSRRLENLIAQLPGEKKNGLFGNLIALSLGLTPNFKSNFDLAEDAKLQLSKDTYDDDLDNLLAQIGDQYADLFLAAKNLSDAILLSDILRVNTEITKAPLSASMIKRYDEHHQDLTLLKALVRQQLPEKYKEIFFDQSKNGYAGYIDGGASQEEFYKFIKPILEKMDGTEELLVKLNREDLLRKQRTFDNGSIPHQIHLGELHAILRRQEDFYPFLKDNREKIEKILTFRIPYYVGPLARGNSRFAWMTRKSEETITPWNFEEVVDKGASAQSFIERMTNFDKNLPNEKVLPKHSLLYEYFTVYNELTKVKYVTEGMRKPAFLSGEQKKAIVDLLFKTNRKVTVKQLKEDYFKKIECFDSVEISGVEDRFNASLGTYHDLLKIIKDKDFLDNEENEDILEDIVLTLTLFEDREMIEERLKTYAHLFDDKVMKQLKRRRYTGWGRLSRKLINGIRDKQSGKTILDFLKSDGFANRNFMQLIHDDSLTFKEDIQKAQVSGQGDSLHEHIANLAGSPAIKKGILQTVKVVDELVKVMGRHKPENIVIEMARENQTTQKGQKNSRERMKRIEEGIKELGSQILKEHPVENTQLQNEKLYLYYLQNGRDMYVDQELDINRLSDYDVDHIVPQSFLKDDSIDNKVLTRSDKNRGKSDNVPSEEVVKKMKNYWRQLLNAKLITQRKFDNLTKAERGGLSELDKAGFIKRQLVETRQITKHVAQILDSRMNTKYDENDKLIREVKVITLKSKLVSDFRKDFQFYKVREINNYHHAHDAYLNAVVGTALIKKYPKLESEFVYGDYKVYDVRKMIAKSEQEIGKATAKYFFYSNIMNFFKTEITLANGEIRKRPLIETNGETGEIVWDKGRDFATVRKVLSMPQVNIVKKTEVQTGGFSKESILPKRNSDKLIARKKDWDPKKYGGFESPTVAYSVLVVAKVEKGKSKKLKSVKELLGITIMERSSFEKNPIDFLEAKGYKEVKKDLIIKLPKYSLFELENGRKRMLASAGELQKGNELALPSKYVNFLYLASHYEKLKGSPEDNEQKQLFVEQHKHYLDEIIEQISEFSKRVILADANLDKVLSAYNKHRDKPIREQAENIIHLFTLTNLGAPAAFKYFDTTIDRKQYRSTKEVLDATLIHQSITGLYETRIDLSQLGGD

SEQ ID NO: 235 - protein, 1368 aa, Streptococcus pyogenes
  REGION 1..1368: note = MISC_FEATURE - PAM-binding SpVQR Cas9 polypeptide sequence
MDKKYSIGLAIGTNSVGWAVITDEYKVPSKKFKVLGNTDRHSIKKNLIGALLFDSGETAEATRLKRTARRRYTRRKNRICYLQEIFSNEMAKVDDSFFHRLEESFLVEEDKKHERHPIFGNIVDEVAYHEKYPTIYHLRKKLVDSTDKADLRLIYLALAHMIKFRGHFLIEGDLNPDNSDVDKLFIQLVQTYNQLFEENPINASGVDAKAILSARLSKSRRLENLIAQLPGEKKNGLFGNLIALSLGLTPNFKSNFDLAEDAKLQLSKDTYDDDLDNLLAQIGDQYADLFLAAKNLSDAILLSDILRVNTEITKAPLSASMIKRYDEHHQDLTLLKALVRQQLPEKYKEIFFDQSKNGYAGYIDGGASQEEFYKFIKPILEKMDGTEELLVKLNREDLLRKQRTFDNGSIPHQIHLGELHAILRRQEDFYPFLKDNREKIEKILTFRIPYYVGPLARGNSRFAWMTRKSEETITPWNFEEVVDKGASAQSFIERMTNFDKNLPNEKVLPKHSLLYEYFTVYNELTKVKYVTEGMRKPAFLSGEQKKAIVDLLFKTNRKVTVKQLKEDYFKKIECFDSVEISGVEDRFNASLGTYHDLLKIIKDKDFLDNEENEDILEDIVLTLTLFEDREMIEERLKTYAHLFDDKVMKQLKRRRYTGWGRLSRKLINGIRDKQSGKTILDFLKSDGFANRNFMQLIHDDSLTFKEDIQKAQVSGQGDSLHEHIANLAGSPAIKKGILQTVKVVDELVKVMGRHKPENIVIEMARENQTTQKGQKNSRERMKRIEEGIKELGSQILKEHPVENTQLQNEKLYLYYLQNGRDMYVDQELDINRLSDYDVDHIVPQSFLKDDSIDNKVLTRSDKNRGKSDNVPSEEVVKKMKNYWRQLLNAKLITQRKFDNLTKAERGGLSELDKAGFIKRQLVETRQITKHVAQILDSRMNTKYDENDKLIREVKVITLKSKLVSDFRKDFQFYKVREINNYHHAHDAYLNAVVGTALIKKYPKLESEFVYGDYKVYDVRKMIAKSEQEIGKATAKYFFYSNIMNFFKTEITLANGEIRKRPLIETNGETGEIVWDKGRDFATVRKVLSMPQVNIVKKTEVQTGGFSKESILPKRNSDKLIARKKDWDPKKYGGFVSPTVAYSVLVVAKVEKGKSKKLKSVKELLGITIMERSSFEKNPIDFLEAKGYKEVKKDLIIKLPKYSLFELENGRKRMLASAGELQKGNELALPSKYVNFLYLASHYEKLKGSPEDNEQKQLFVEQHKHYLDEIIEQISEFSKRVILADANLDKVLSAYNKHRDKPIREQAENIIHLFTLTNLGAPAAFKYFDTTIDRKQYRSTKEVLDATLIHQSITGLYETRIDLSQLGGD

SEQ ID NO: 236 - protein, 1368 aa, Streptococcus pyogenes
  REGION 1..1368: note = MISC_FEATURE - SpVQR Cas9 polypeptide sequence
MDKKYSIGLAIGTNSVGWAVITDEYKVPSKKFKVLGNTDRHSIKKNLIGALLFDSGETAEATRLKRTARRRYTRRKNRICYLQEIFSNEMAKVDDSFFHRLEESFLVEEDKKHERHPIFGNIVDEVAYHEKYPTIYHLRKKLVDSTDKADLRLIYLALAHMIKFRGHFLIEGDLNPDNSDVDKLFIQLVQTYNQLFEENPINASGVDAKAILSARLSKSRRLENLIAQLPGEKKNGLFGNLIALSLGLTPNFKSNFDLAEDAKLQLSKDTYDDDLDNLLAQIGDQYADLFLAAKNLSDAILLSDILRVNTEITKAPLSASMIKRYDEHHQDLTLLKALVRQQLPEKYKEIFFDQSKNGYAGYIDGGASQEEFYKFIKPILEKMDGTEELLVKLNREDLLRKQRTFDNGSIPHQIHLGELHAILRRQEDFYPFLKDNREKIEKILTFRIPYYVGPLARGNSRFAWMTRKSEETITPWNFEEVVDKGASAQSFIERMTNFDKNLPNEKVLPKHSLLYEYFTVYNELTKVKYVTEGMRKPAFLSGEQKKAIVDLLFKTNRKVTVKQLKEDYFKKIECFDSVEISGVEDRFNASLGTYHDLLKIIKDKDFLDNEENEDILEDIVLTLTLFEDREMIEERLKTYAHLFDDKVMKQLKRRRYTGWGRLSRKLINGIRDKQSGKTILDFLKSDGFANRNFMQLIHDDSLTFKEDIQKAQVSGQGDSLHEHIANLAGSPAIKKGILQTVKVVDELVKVMGRHKPENIVIEMARENQTTQKGQKNSRERMKRIEEGIKELGSQILKEHPVENTQLQNEKLYLYYLQNGRDMYVDQELDINRLSDYDVDHIVPQSFLKDDSIDNKVLTRSDKNRGKSDNVPSEEVVKKMKNYWRQLLNAKLITQRKFDNLTKAERGGLSELDKAGFIKRQLVETRQITKHVAQILDSRMNTKYDENDKLIREVKVITLKSKLVSDFRKDFQFYKVREINNYHHAHDAYLNAVVGTALIKKYPKLESEFVYGDYKVYDVRKMIAKSEQEIGKATAKYFFYSNIMNFFKTEITLANGEIRKRPLIETNGETGEIVWDKGRDFATVRKVLSMPQVNIVKKTEVQTGGFSKESILPKRNSDKLIARKKDWDPKKYGGFVSPTVAYSVLVVAKVEKGKSKKLKSVKELLGITIMERSSFEKNPIDFLEAKGYKEVKKDLIIKLPKYSLFELENGRKRMLASARELQKGNELALPSKYVNFLYLASHYEKLKGSPEDNEQKQLFVEQHKHYLDEIIEQISEFSKRVILADANLDKVLSAYNKHRDKPIREQAENIIHLFTLTNLGAPAAFKYFDTTIDRKEYRSTKEVLDATLIHQSITGLYETRIDLSQLGGD

SEQ ID NO: 237 - protein, 1359 aa, Streptococcus macacae
  REGION 1..1359: note = MISC_FEATURE - SpyMacCas9 polypeptide sequence
MDKKYSIGLDIGTNSVGWAVITDDYKVPSKKFKVLGNTDRHSIKKNLIGALLFGSGETAEATRLKRTARRRYTRRKNRICYLQEIFSNEMAKVDDSFFHRLEESFLVEEDKKHERHPIFGNIVDEVAYHEKYPTIYHLRKKLADSTDKADLRLIYLALAHMIKFRGHFLIEGDLNPDNSDVDKLFIQLVQIYNQLFEENPINASRVDAKAILSARLSKSRRLENLIAQLPGEKRNGLFGNLIALSLGLTPNFKSNFDLAEDAKLQLSKDTYDDDLDNLLAQIGDQYADLFLAAKNLSDAILLSDILRVNSEITKAPLSASMIKRYDEHHQDLTLLKALVRQQLPEKYKEIFFDQSKNGYAGYIDGGASQEEFYKFIKPILEKMDGTEELLVKLNREDLLRKQRTFDNGSIPHQIHLGELHAILRRQEDFYPFLKDNREKIEKILTFRIPYYVGPLARGNSRFAWMTRKSEETITPWNFEEVVDKGASAQSFIERMTNFDKNLPNEKVLPKHSLLYEYFTVYNELTKVKYVTEGMRKPAFLSGEQKKAIVDLLFKTNRKVTVKQLKEDYFKKIECFDSVEISGVEDRFNASLGAYHDLLKIIKDKDFLDNEENEDILEDIVLTLTLFEDRGMIEERLKTYAHLFDDKVMKQLKRRRYTGWGRLSRKLINGIRDKQSGKTILDFLKSDGFANRNFMQLIHDDSLTFKEDIQKAQVSGQGHSLHEQIANLAGSPAIKKGILQTVKIVDELVKVMGHKPENIVIEMARENQTTQKGQKNSRERMKRIEEGIKELGSQILKEHPVENTQLQNEKLYLYYLQNGRDMYVDQELDINRLSDYDVDHIVPQSFIKDDSIDNKVLTRSDKNRGKSDNVPSEEVVKKMKNYWRQLLNAKLITQRKFDNLTKAERGGLSELDKAGFIKRQLVETRQITKHVAQILDSRMNTKYDENDKLIREVKVITLKSKLVSDFRKDFQFYKVREINNYHHAHDAYLNAVVGTALIKKYPKLESEFVYGDYKVYDVRKMIAKSEQEIGKATAKYFFYSNIMNFFKTEITLANGEIRKRPLIETNGETGEIVWDKGRDFATVRKVLSMPQVNIVKKTEIQTVGQNGGLFDDNPKSPLEVTPSKLVPLKKELNPKKYGGYQKPTTAYPVLLITDTKQLIPISVMNKKQFEQNPVKFLRDRGYQQVGKNDFIKLPKYTLVDIGDGIKRLWASSKEIHKGNQLVVSKKSQILLYHAHHLDSDLSNDYLQNHNQQFDVLFNEIISFSKKCKLGKEHIQKIENVYSNKKNSASIEELAESFIKLLGFTQLGATSPFNFLGVKLNQKQYKGKKDYILPCTEGTLIRQSITGLYETRVDLSKIGED

SEQ ID NO: 238 - protein, 1410 aa, synthetic construct
  REGION 1..1410: note = CP5 polypeptide sequence
  REGION 1..341: note = MISC_FEATURE - Sequence derived from Cas9
  REGION 342..362: note = MISC_FEATURE - Linker sequence
  REGION 363..1388: note = MISC_FEATURE - Sequence derived from Cas9
  REGION 1389..1410: note = MISC_FEATURE - Bipartite nuclear localization sequence
EIGKATAKYFFYSNIMNFFKTEITLANGEIRKRPLIETNGETGEIVWDKGRDFATVRKVLSMPQVNIVKKTEVQTGGFSKESILPKRNSDKLIARKKDWDPKKYGGFMQPTVAYSVLVVAKVEKGKSKKLKSVKELLGITIMERSSFEKNPIDFLEAKGYKEVKKDLIIKLPKYSLFELENGRKRMLASAKFLQKGNELALPSKYVNFLYLASHYEKLKGSPEDNEQKQLFVEQHKHYLDEIIEQISEFSKRVILADANLDKVLSAYNKHRDKPIREQAENIIHLFTLTNLGAPRAFKYFDTTIARKEYRSTKEVLDATLIHQSITGLYETRIDLSQLGGDGGSGGSGGSGGSGGSGGSGGMDKKYSIGLAIGTNSVGWAVITDEYKVPSKKFKVLGNTDRHSIKKNLIGALLFDSGETAEATRLKRTARRRYTRRKNRICYLQEIFSNEMAKVDDSFFHRLEESFLVEEDKKHERHPIFGNIVDEVAYHEKYPTIYHLRKKLVDSTDKADLRLIYLALAHMIKFRGHFLIEGDLNPDNSDVDKLFIQLVQTYNQLFEENPINASGVDAKAILSARLSKSRRLENLIAQLPGEKKNGLFGNLIALSLGLTPNFKSNFDLAEDAKLQLSKDTYDDDLDNLLAQIGDQYADLFLAAKNLSDAILLSDILRVNTEITKAPLSASMIKRYDEHHQDLTLLKALVRQQLPEKYKEIFFDQSKNGYAGYIDGGASQEEFYKFIKPILEKMDGTEELLVKLNREDLLRKQRTFDNGSIPHQIHLGELHAILRRQEDFYPFLKDNREKIEKILTFRIPYYVGPLARGNSRFAWMTRKSEETITPWNFEEVVDKGASAQSFIERMTNFDKNLPNEKVLPKHSLLYEYFTVYNELTKVKYVTEGMRKPAFLSGEQKKAIVDLLFKTNRKVTVKQLKEDYFKKIECFDSVEISGVEDRFNASLGTYHDLLKIIKDKDFLDNEENEDILEDIVLTLTLFEDREMIEERLKTYAHLFDDKVMKQLKRRRYTGWGRLSRKLINGIRDKQSGKTILDFLKSDGFANRNFMQLIHDDSLTFKEDIQKAQVSGQGDSLHEHIANLAGSPAIKKGILQTVKVVDELVKVMGRHKPENIVIEMARENQTTQKGQKNSRERMKRIEEGIKELGSQILKEHPVENTQLQNEKLYLYYLQNGRDMYVDQELDINRLSDYDVDHIVPQSFLKDDSIDNKVLTRSDKNRGKSDNVPSEEVVKKMKNYWRQLLNAKLITQRKFDNLTKAERGGLSELDKAGFIKRQLVETRQITKHVAQILDSRMNTKYDENDKLIREVKVITLKSKLVSDFRKDFQFYKVREINNYHHAHDAYLNAVVGTALIKKYPKLESEFVYGDYKVYDVRKMIAKSEQEGADKRTADGSEFESPKKKRKV

SEQ ID NO: 239 - protein, 1302 aa, synthetic construct
  REGION 1..1302: note = Cas12c1 polypeptide sequence
MQTKKTHLHLISAKASRKYRRTIACLSDTAKKDLERRKQSGAADPAQELSCLKTIKFKLEVPEGSKLPSFDRISQIYNALETIEKGSLSYLLFALILSGFRIFPNSSAAKTFASSSCYKNDQFASQIKEIFGEMVKNFIPSELESILKKGRRKNNKDWTEENIKRVLNSEFGRKNSEGSSALFDSFLSKFSQELFRKFDSWNEVNKKYLEAAELLDSMLASYGPFDSVCKMIGDSDSRNSLPDKSTIAFTNNAEITVDIESSVMPYMAIAALLREYRQSKSKAAPVAYVQSHLTTTNGNGLSWFFKFGLDLIRKAPVSSKQSTSDGSKSLQELFSVPDDKLDGLKFIKEACEALPEASLLCGEKGELLGYQDFRTSFAGHIDSWVANYVNRLFELIELVNQLPESIKLPSILTQKNHNLVASLGLQEAEVSHSLELFEGLVKNVRQTLKKLAGIDISSSPNEQDIKEFYAFSDVLNRLGSIRNQIENAVQTAKKDKIDLESAIEWKEWKKLKKLPKLNGLGGGVPKQQELLDKALESVKQIRHYQRIDFERVIQWAVNEHCLETVPKFLVDAEKKKINKESSTDFAAKENAVRFLLEGIGAAARGKTDSVSKAAYNWFVVNNFLAKKDLNRYFINCQGCIYKPPYSKRRSLAFALRSDNKDTIEVVWEKFETFYKEISKEIEKFNIFSQEFQTFLHLENLRMKLLLRRIQKPIPAEIAFFSLPQEYYDSLPPNVAFLALNQEITPSEYITQFNLYSSFLNGNLILLRRSRSYLRAKFSWVGNSKLIYAAKEARLWKIPNAYWKSDEWKMILDSNVLVFDKAGNVLPAPTLKKVCEREGDLRLFYPLLRQLPHDWCYRNPFVKSVGREKNVIEVNKEGEPKVASALPGSLFRLIGPAPFKSLLDDCFFNPLDKDLRECMLIVDQEISQKVEAQKVEASLESCTYSIAVPIRYHLEEPKVSNQFENVLAIDQGEAGLAYAVFSLKSIGEAETKPIAVGTIRIPSIRRLIHSVSTYRKKKQRLQNFKQNYDSTAFIMRENVTGDVCAKIVGLMKEFNAFPVLEYDVKNLESGSRQLSAVYKAVNSHFLYFKEPGRDALRKQLWYGGDSWTIDGIEIVTRERKEDGKEGVEKIVPLKVFPGRSVSARFTSKTCSCCGRNVFDWLFTEKKAKTNKKFNVNSKGELTTADGVIQLFEADRSKGPKFYARRKERTPLTKPIAKGSYSLEEIERRVRTNLRRAPKSKQSRDTSQSQYFCVYKDCALHFSGMQADENAAINIGRRFLTALRKNRRSDFPSNVKISDRLLDN

SEQ ID NO: 240 - protein, 1218 aa, synthetic construct
  REGION 1..1218: note = Cas12c2 polypeptide sequence
MTKHSIPLHAFRNSGADARKWKGRIALLAKRGKETMRTLQFPLEMSEPEAAAINTTPFAVAYNAIEGTGKGTLFDYWAKLHLAGFRFFPSGGAATIFRQQAVFEDASWNAAFCQQSGKDWPWLVPSKLYERFTKAPREVAKKDGSKKSIEFTQENVANESHVSLVGASITDKTPEDQKEFFLKMAGALAEKFDSWKSANEDRIVAMKVIDEFLKSEGLHLPSLENIAVKCSVETKPDNATVAWHDAPMSGVQNLAIGVFATCASRIDNIYDLNGGKLSKLIQESATTPNVTALSWLFGKGLEYFRTTDIDTIMQDFNIPASAKESIKPLVESAQAIPTMTVLGKKNYAPFRPNFGGKIDSWIANYASRLMLLNDILEQIEPGFELPQALLDNETLMSGIDMTGDELKELIEAVYAWVDAAKQGLATLLGRGGNVDDAVQTFEQFSAMMDTLNGTLNTISARYVRAVEMAGKDEARLEKLIECKFDIPKWCKSVPKLVGISGGLPKVEEEIKVMNAAFKDVRARMFVRFEEIAAYVASKGAGMDVYDALEKRELEQIKKLKSAVPERAHIQAYRAVLHRIGRAVQNCSEKTKQLFSSKVIEMGVFKNPSHLNNFIFNQKGAIYRSPFDRSRHAPYQLHADKLLKNDWLELLAEISATLMASESTEQMEDALRLERTRLQLQLSGLPDWEYPASLAKPDIEVEIQTALKMQLAKDTVTSDVLQRAFNLYSSVLSGLTFKLLRRSFSLKMRFSVADTTQLIYVPKVCDWAIPKQYLQAEGEIGIAARVVTESSPAKMVTEVEMKEPKALGHFMQQAPHDWYFDASLGGTQVAGRIVEKGKEVGKERKLVGYRMRGNSAYKTVLDKSLVGNTELSQCSMIIEIPYTQTVDADFRAQVQAGLPKVSINLPVKETITASNKDEQMLFDRFVAIDLGERGLGYAVFDAKTLELQESGHRPIKAITNLLNRTHHYEQRPNQRQKFQAKFNVNLSELRENTVGDVCHQINRICAYYNAFPVLEYMVPDRLDKQLKSVYESVTNRYIWSSTDAHKSARVQFWLGGETWEHPYLKSAKDKKPLVLSPGRGASGKGTSQTCSCCGRNPFDLIKDMKPRAKIAVVDGKAKLENSELKLFERNLESKDDMLARRHRNERAGMEQPLTPGNYTVDEIKALLRANLRRAPKNRRTKDTTVSEYHCVFSDCGKTMHADENAAVNIGGKFIADIEK

SEQ ID NO: 241 - protein, 1252 aa, Oleiphilus sp.
  REGION 1..1252: note = MISC_FEATURE - OspCas12c polypeptide sequence
MTKLRHRQKKLTHDWAGSKKREVLGSNGKLQNPLLMPVKKGQVTEFRKAFSAYARATKGEMTDGRKNMFTHSFEPFKTKPSLHQCELADKAYQSLHSYLPGSLAHFLLSAHALGFRIFSKSGEATAFQASSKIEAYESKLASELACVDLSIQNLTISTLFNALTTSVRGKGEETSADPLIARFYTLLTGKPLSRDTQGPERDLAEVISRKIASSFGTWKEMTANPLQSLQFFEEELHALDANVSLSPAFDVLIKMNDLQGDLKNRTIVFDPDAPVFEYNAEDPADIIIKLTARYAKEAVIKNQNVGNYVKNAITTTNANGLGWLLNKGLSLLPVSTDDELLEFIGVERSHPSCHALIELIAQLEAPELFEKNVFSDTRSEVQGMIDSAVSNHIARLSSSRNSLSMDSEELERLIKSFQIHTPHCSLFIGAQSLSQQLESLPEALQSGVNSADILLGSTQYMLTNSLVEESIATYQRTLNRINYLSGVAGQINGAIKRKAIDGEKIHLPAAWSELISLPFIGQPVIDVESDLAHLKNQYQTLSNEFDTLISALQKNFDLNFNKALLNRTQHFEAMCRSTKKNALSKPEIVSYRDLLARLTSCLYRGSLVLRRAGIEVLKKHKIFESNSELREHVHERKHFVFVSPLDRKAKKLLRLTDSRPDLLHVIDEILQHDNLENKDRESLWLVRSGYLLAGLPDQLSSSFINLPIITQKGDRRLIDLIQYDQINRDAFVMLVTSAFKSNLSGLQYRANKQSFVVTRTLSPYLGSKLVYVPKDKDWLVPSQMFEGRFADILQSDYMVWKDAGRLCVIDTAKHLSNIKKSVFSSEEVLAFLRELPHRTFIQTEVRGLGVNVDGIAFNNGDIPSLKTFSNCVQVKVSRTNTSLVQTLNRWFEGGKVSPPSIQFERAYYKKDDQIHEDAAKRKIRFQMPATELVHASDDAGWTPSYLLGIDPGEYGMGLSLVSINNGEVLDSGFIHINSLINFASKKSNHQTKVVPRQQYKSPYANYLEQSKDSAAGDIAHILDRLIYKLNALPVFEALSGNSQSAADQVWTKVLSFYTWGDNDAQNSIRKQHWFGASHWDIKGMLRQPPTEKKPKPYIAFPGSQVSSYGNSQRCSCCGRNPIEQLREMAKDTSIKELKIRNSEIQLFDGTIKLFNPDPSTVIERRRHNLGPSRIPVADRTFKNISPSSLEFKELITIVSRSIRHSPEFIAKKRGIGSEYFCAYSDCNSSLNSEANAAANVAQKFQKQLFFEL

SEQ ID NO: 242 - protein, 767 aa, synthetic construct
  REGION 1..767: note = Cas12g1 polypeptide sequence
MAQASSTPAVSPRPRPRYREERTLVRKLLPRPGQSKQEFRENVKKLRKAFLQFNADVSGVCQWAIQFRPRYGKPAEPTETFWKFFLEPETSLPPNDSRSPEFRRLQAFEAAAGINGAAALDDPAFTNELRDSILAVASRPKTKEAQRLFSRLKDYQPAHRMILAKVAAEWIESRYRRAHQNWERNYEEWKKEKQEWEQNHPELTPEIREAFNQIFQQLEVKEKRVRICPAARLLQNKDNCQYAGKNKHSVLCNQFNEFKKNHLQGKAIKFFYKDAEKYLRCGLQSLKPNVQGPFREDWNKYLRYMNLKEETLRGKNGGRLPHCKNLGQECEFNPHTALCKQYQQQLSSRPDLVQHDELYRKWRREYWREPRKPVFRYPSVKRHSIAKIFGENYFQADFKNSVVGLRLDSMPAGQYLEFAFAPWPRNYRPQPGETEISSVHLHFVGTRPRIGFRFRVPHKRSRFDCTQEELDELRSRTFPRKAQDQKFLEAARKRLLETFPGNAEQELRLLAVDLGTDSARAAFFIGKTFQQAFPLKIVKIEKLYEQWPNQKQAGDRRDASSKQPRPGLSRDHVGRHLQKMRAQASEIAQKRQELTGTPAPETTTDQAAKKATLQPFDLRGLTVHTARMIRDWARLNARQIIQLAEENQVDLIVLESLRGFRPPGYENLDQEKKRRVAFFAHGRIRRKVTEKAVERGMRVVTVPYLASSKVCAECRKKQKDNKQWEKNKKRGLFKCEGCGSQAQVDENAARVLGRVFWGEIELPTAIP

SEQ ID NO: 243 - protein, 870 aa, synthetic construct
  REGION 1..870: note = Cas12h1 polypeptide sequence
MKVHEIPRSQLLKIKQYEGSFVEWYRDLQEDRKKFASLLFRWAAFGYAAREDDGATYISPSQALLERRLLLGDAEDVAIKFLDVLFKGGAPSSSCYSLFYEDFALRDKAKYSGAKREFIEGLATMPLDKIIERIRQDEQLSKIPAEEWLILGAEYSPEEIWEQVAPRIVNVDRSLGKQLRERLGIKCRRPHDAGYCKILMEVVARQLRSHNETYHEYLNQTHEMKTKVANNLTNEFDLVCEFAEVLEEKNYGLGWYVLWQGVKQALKEQKKPTKIQIAVDQLRQPKFAGLLTAKWRALKGAYDTWKLKKRLEKRKAFPYMPNWDNDYQIPVGLTGLGVFTLEVKRTEVVVDLKEHGKLFCSHSHYFGDLTAEKHPSRYHLKFRHKLKLRKRDSRVEPTIGPWIEAALREITIQKKPNGVFYLGLPYALSHGIDNFQIAKRFFSAAKPDKEVINGLPSEMVVGAADLNLSNIVAPVKARIGKGLEGPLHALDYGYGELIDGPKILTPDGPRCGELISLKRDIVEIKSAIKEFKACQREGLTMSEETTTWLSEVESPSDSPRCMIQSRIADTSRRLNSFKYQMNKEGYQDLAEALRLLDAMDSYNSLLESYQRMHLSPGEQSPKEAKFDTKRASFRDLLRRRVAHTIVEYFDDCDIVFFEDLDGPSDSDSRNNALVKLLSPRTLLLYIRQALEKRGIGMVEVAKDGTSQNNPISGHVGWRNKQNKSEIYFYEDKELLVMDADEVGAMNILCRGLNHSVCPYSFVTKAPEKKNDEKKEGDYGKRVKRFLKDRYGSSNVRFLVASMGFVTVTTKRPKDALVGKRLYYHGGELVTHDLHNRMKDEIKYLVEKEVLARRVSLSDSTIKSYKSFAHV

SEQ ID NO: 244 - protein, 1093 aa, synthetic construct
  REGION 1..1093: note = Cas12i1 polypeptide sequence
MSNKEKNASETRKAYTTKMIPRSHDRMKLLGNFMDYLMDGTPIFFELWNQFGGGIDRDIISGTANKDKISDDLLLAVNWFKVMPINSKPQGVSPSNLANLFQQYSGSEPDIQAQEYFASNFDTEKHQWKDMRVEYERLLAELQLSRSDMHHDLKLMYKEKCIGLSLSTAHYITSVMFGTGAKNNRQTKHQFYSKVIQLLEESTQINSVEQLASIILKAGDCDSYRKLRIRCSRKGATPSILKIVQDYELGTNHDDEVNVPSLIANLKEKLGRFEYECEWKCMEKIKAFLASKVGPYYLGSYSAMLENALSPIKGMTTKNCKFVLKQIDAKNDIKYENEPFGKIVEGFFDSPYFESDTNVKWVLHPHHIGESNIKTLWEDLNAIHSKYEEDIASLSEDKKEKRIKVYQGDVCQTINTYCEEVGKEAKTPLVQLLRYLYSRKDDIAVDKIIDGITFLSKKHKVEKQKINPVIQKYPSFNFGNNSKLLGKIISPKDKLKHNLKCNRNQVDNYIWIEIKVLNTKTMRWEKHHYALSSTRFLEEVYYPATSENPPDALAARFRTKTNGYEGKPALSAEQIEQIRSAPVGLRKVKKRQMRLEAARQQNLLPRYTWGKDFNINICKRGNNFEVTLATKVKKKKEKNYKVVLGYDANIVRKNTYAAIEAHANGDGVIDYNDLPVKPIESGFVTVESQVRDKSYDQLSYNGVKLLYCKPHVESRRSFLEKYRNGTMKDNRGNNIQIDFMKDFEAIADDETSLYYFNMKYCKLLQSSIRNHSSQAKEYREEIFELLRDGKLSVLKLSSLSNLSFVMFKVAKSLIGTYFGHLLKKPKNSKSDVKAPPITDEDKQKADPEMFALRLALEEKRLNKVKSKKEVIANKIVAKALELRDKYGPVLIKGENISDTTKKGKKSSTNSFLMDWLARGVANKVKEMVMMHQGLEFVEVNPNFTSHQDPFVHKNPENTFRARYSRCTPSELTEKNRKEILSFLSDKPSKRPTNAYYNEGAMAFLATYGLKKNDVLGVSLEKFKQIMANILHQRSEDQLLFPSRGGMFYLATYKLDADATSVNWNGKQFWVCNADLVAAYNVGLVDIQKDFKKK

SEQ ID NO: 245 - protein, 1054 aa, synthetic construct
  REGION 1..1054: note = Cas12i2 polypeptide sequence
MSSAIKSYKSVLRPNERKNQLLKSTIQCLEDGSAFFFKMLQGLFGGITPEIVRFSTEQEKQQQDIALWCAVNWFRPVSQDSLTHTIASDNLVEKFEEYYGGTASDAIKQYFSASIGESYYWNDCRQQYYDLCRELGVEVSDLTHDLEILCREKCLAVATESNQNNSIISVLFGTGEKEDRSVKLRITKKILEAISNLKEIPKNVAPIQEIILNVAKATKETFRQVYAGNLGAPSTLEKFIAKDGQKEFDLKKLQTDLKKVIRGKSKERDWCCQEELRSYVEQNTIQYDLWAWGEMFNKAHTALKIKSTRNYNFAKQRLEQFKEIQSLNNLLVVKKLNDFFDSEFFSGEETYTICVHHLGGKDLSKLYKAWEDDPADPENAIVVLCDDLKNNFKKEPIRNILRYIFTIRQECSAQDILAAAKYNQQLDRYKSQKANPSVLGNQGFTWTNAVILPEKAQRNDRPNSLDLRIWLYLKLRHPDGRWKKHHIPFYDTRFFQEIYAAGNSPVDTCQFRTPRFGYHLPKLTDQTAIRVNKKHVKAAKTEARIRLAIQQGTLPVSNLKITEISATINSKGQVRIPVKFDVGRQKGTLQIGDRFCGYDQNQTASHAYSLWEVVKEGQYHKELGCFVRFISSGDIVSITENRGNQFDQLSYEGLAYPQYADWRKKASKFVSLWQITKKNKKKEIVTVEAKEKFDAICKYQPRLYKFNKEYAYLLRDIVRGKSLVELQQIRQEIFRFIEQDCGVTRLGSLSLSTLETVKAVKGIIYSYFSTALNASKNNPISDEQRKEFDPELFALLEKLELIRTRKKKQKVERIANSLIQTCLENNIKFIRGEGDLSTTNNATKKKANSRSMDWLARGVFNKIRQLAPMHNITLFGCGSLYTSHQDPLVHRNPDKAMKCRWAAIPVKDIGDWVLRKLSQNLRAKNIGTGEYYHQGVKEFLSHYELQDLEEELLKWRSDRKSNIPCWVLQNRLAEKLGNKEAVVYIPVRGGRIYFATHKVATGAVSIVFDQKQVWVCNADHVAAANIALTVKGIGEQSSDEENPDGSRIKLQLTS

SEQ ID NO: 246 - protein, 4 aa, synthetic construct
  REGION 1..4: note = synthetic peptide sequence
GGGS

SEQ ID NO: 247 - protein, 5 aa, synthetic construct
  REGION 1..5: note = synthetic peptide sequence
GGGGS

SEQ ID NO: 248 - protein, 5 aa, synthetic construct
  REGION 1..5: note = synthetic peptide sequence
EAAAK

SEQ ID NO: 249 - protein, 16 aa, synthetic construct
  REGION 1..16: note = synthetic peptide sequence
SGSETPGTSESATPES

SEQ ID NO: 250 - protein, 6 aa, synthetic construct
  REGION 1..6: note = linker peptide sequence
GGSGGS

SEQ ID NO: 251 - protein, 20 aa, synthetic construct
  REGION 1..20: note = synthetic peptide sequence
GSSGSETPGTSESATPESSG

SEQ ID NO: 252 - DNA, 18 bp, synthetic construct
  misc_feature 1..18: note = synthetic oligonucleotide sequence
  source 1..18: mol_type = other DNA
ggaggctctggaggaagc

SEQ ID NO: 253 - DNA, 60 bp, synthetic construct
  misc_feature 1..60: note = synthetic oligonucleotide sequence
  source 1..60: mol_type = other DNA
ggctcttctggatctgaaacacctggcacaagcgagagcgccacccctgagagctctggc

SEQ ID NO: 254 - protein, 1129 aa, Alicyclobacillus acidiphilus
  REGION 1..1129: note = MISC_FEATURE - AacCas12b polypeptide sequence
MAVKSMKVKLRLDNMPEIRAGLWKLHTEVNAGVRYYTEWLSLLRQENLYRRSPNGDGEQECYKTAEECKAELLERLRARQVENGHCGPAGSDDELLQLARQLYELLVPQAIGAKGDAQQIARKFLSPLADKDAVGGLGIAKAGNKPRWVRMREAGEPGWEEEKAKAEARKSTDRTADVLRALADFGLKPLMRVYTDSDMSSVQWKPLRKGQAVRTWDRDMFQQAIERMMSWESWNQRVGEAYAKLVEQKSRFEQKNFVGQEHLVQLVNQLQQDMKEASHGLESKEQTAHYLTGRALRGSDKVFEKWEKLDPDAPFDLYDTEIKNVQRRNTRRFGSHDLFAKLAEPKYQALWREDASFLTRYAVYNSIVRKLNHAKMFATFTLPDATAHPIWTRFDKLGGNLHQYTFLFNEFGEGRHAIRFQKLLTVEDGVAKEVDDVTVPISMSAQLDDLLPRDPHELVALYFQDYGAEQHLAGEFGGAKIQYRRDQLNHLHARRGARDVYLNLSVRVQSQSEARGERRPPYAAVFRLVGDNHRAFVHFDKLSDYLAEHPDDGKLGSEGLLSGLRVMSVDLGLRTSASISVFRVARKDELKPNSEGRVPFCFPIEGNENLVAVHERSQLLKLPGETESKDLRAIREERQRTLRQLRTQLAYLRLLVRCGSEDVGRRERSWAKLIEQPMDANQMTPDWREAFEDELQKLKSLYGICGDREWTEAVYESVRRVWRHMGKQVRDWRKDVRSGERPKIRGYQKDVVGGNSIEQIEYLERQYKFLKSWSFFGKVSGQVIRAEKGSRFAITLREHIDHAKEDRLKKLADRIIMEALGYVYALDDERGKGKWVAKYPPCQLILLEELSEYQFNNDRPPSENNQLMQWSHRGVFQELLNQAQVHDLLVGTMYAAFSSRFDARTGAPGIRCRRVPARCAREQNPEPFPWWLNKFVAEHKLDGCPLRADDLIPTGEGEFFVSPFSAEEGDFHQIHADLNAAQNLQRRLWSDFDISQIRLRCDWGEVDGEPVLIPRTTGKRTADSYGNKVFYTKTGVTYYERERGKKRRKVFAQEELSEEEAELLVEADEAREKSVVLMRDPSGIINRGDWTRQKEFWSMVNQRIEGYLVKQIRSRVRLQESACENTGDI

SEQ ID NO: 255 - protein, 1140 aa, Bacillus hisashii
  REGION 1..1140: note = MISC_FEATURE - BhCas12b polypeptide sequence
MAPKKKRKVGIHGVPAAATRSFILKIEPNEEVKKGLWKTHEVLNHGIAYYMNILKLIRQEAIYEHHEQDPKNPKKVSKAEIQAELWDFVLKMQKCNSFTHEVDKDEVFNILRELYEELVPSSVEKKGEANQLSNKFLYPLVDPNSQSGKGTASSGRKPRWYNLKIAGDPSWEEEKKKWEEDKKKDPLAKILGKLAEYGLIPLFIPYTDSNEPIVKEIKWMEKSRNQSVRRLDKDMFIQALERFLSWESWNLKVKEEYEKVEKEYKTLEERIKEDIQALKALEQYEKERQEQLLRDTLNTNEYRLSKRGLRGWREIIQKWLKMDENEPSEKYLEVFKDYQRKHPREAGDYSVYEFLSKKENHFIWRNHPEYPYLYATFCEIDKKKKDAKQQATFTLADPINHPLWVRFEERSGSNLNKYRILTEQLHTEKLKKKLTVQLDRLIYPTESGGWEEKGKVDIVLLPSRQFYNQIFLDIEEKGKHAFTYKDESIKFPLKGTLGGARVQFDRDHLRRYPHKVESGNVGRIYFNMTVNIEPTESPVSKSLKIHRDDFPKVVNFKPKELTEWIKDSKGKKLKSGIESLEIGLRVMSIDLGQRQAAAASIFEVVDQKPDIEGKLFFPIKGTELYAVHRASFNIKLPGETLVKSREVLRKAREDNLKLMNQKLNFLRNVLHFQQFEDITEREKRVTKWISRQENSDVPLVYQDELIQIRELMYKPYKDWVAFLKQLHKRLEVEIGKEVKHWRKSLSDGRKGLYGISLKNIDEIDRTRKFLLRWSLRPTEPGEVRRLEPGQRFAIDQLNHLNALKEDRLKKMANTIIMHALGYCYDVRKKKWQAKNPACQIILFEDLSNYNPYEERSRFENSKLMKWSRREIPRQVALQGEIYGLQVGEVGAQFSSRFHAKTGSPGIRCSVVTKEKLQDNRFFKNLQREGRLTLDKIAVLKEGDLYPDKGGEKFISLSKDRKCVTTHADINAAQNLQKRFWTRTHGFYKVYCKAYQVDGQTVYIPESKDQKQKIIEEFGEGYFILKDGVYEWVNAGKLKIKKGSSKQSSSELVDSDILKDSFDLASELKGEKLMLYRDPSGNVFPSDKWMAAGVFFGKLERILISKLTNQYSISTIEDDSSKQSMKRPAATKKAGQAKKKK

SEQ ID NO: 256 - protein, 1108 aa, Bacillus thermoamylovorans
  REGION 1..1108: note = MISC_FEATURE - BTCas12b polypeptide sequence
MATRSFILKIEPNEEVKKGLWKTHEVLNHGIAYYMNILKLIRQEAIYEHHEQDPKNPKKVSKAEIQAELWDFVLKMQKCNSFTHEVDKDVVFNILRELYEELVPSSVEKKGEANQLSNKFLYPLVDPNSQSGKGTASSGRKPRWYNLKIAGDPSWEEEKKKWEEDKKKDPLAKILGKLAEYGLIPLFIPFTDSNEPIVKEIKWMEKSRNQSVRRLDKDMFIQALERFLSWESWNLKVKEEYEKVEKEHKTLEERIKEDIQAFKSLEQYEKERQEQLLRDTLNTNEYRLSKRGLRGWREIIQKWLKMDENEPSEKYLEVFKDYQRKHPREAGDYSVYEFLSKKENHFIWRNHPEYPYLYATFCEIDKKKKDAKQQATFTLADPINHPLWVRFEERSGSNLNKYRILTEQLHTEKLKKKLTVQLDRLIYPTESGGWEEKGKVDIVLLPSRQFYNQIFLDIEEKGKHAFTYKDESIKFPLKGTLGGARVQFDRDHLRRYPHKVESGNVGRIYFNMTVNIEPTESPVSKSLKIHRDDFPKFVNFKPKELTEWIKDSKGKKLKSGIESLEIGLRVMSIDLGQRQAAAASIFEVVDQKPDIEGKLFFPIKGTELYAVHRASFNIKLPGETLVKSREVLRKAREDNLKLMNQKLNFLRNVLHFQQFEDITEREKRVTKWISRQENSDVPLVYQDELIQIRELMYKPYKDWVAFLKQLHKRLEVEIGKEVKHWRKSLSDGRKGLYGISLKNIDEIDRTRKFLLRWSLRPTEPGEVRRLEPGQRFAIDQLNHLNALKEDRLKKMANTIIMHALGYCYDVRKKKWQAKNPACQIILFEDLSNYNPYEERSRFENSKLMKWSRREIPRQVALQGEIYGLQVGEVGAQFSSRFHAKTGSPGIRCSVVTKEKLQDNRFFKNLQREGRLTLDKIAVLKEGDLYPDKGGEKFISLSKDRKLVTTHADINAAQNLQKRFWTRTHGFYKVYCKAYQVDGQTVYIPESKDQKQKIIEEFGEGYFILKDGVYEWGNAGKLKIKKGSSKQSSSELVDSDILKDSFDLASELKGEKLMLYRDPSGNVFPSDKWMAAGVFFGKLERILISKLTNQYSISTIEDDSSKQSM

SEQ ID NO: 257 - protein, 1112 aa, Bacillus sp.
  REGION 1..1112: note = MISC_FEATURE - BvCas12b (Bacillus sp. V3-13) polypeptide sequence
MAIRSIKLKMKTNSGTDSIYLRKALWRTHQLINEGIAYYMNLLTLYRQEAIGDKTKEAYQAELINIIRNQQRNNGSSEEHGSDQEILALLRQLYELIIPSSIGESGDANQLGNKFLYPLVDPNSQSGKGTSNAGRKPRWKRLKEEGNPDWELEKKKDEERKAKDPTVKIFDNLNKYGLLPLFPLFTNIQKDIEWLPLGKRQSVRKWDKDMFIQAIERLLSWESWNRRVADEYKQLKEKTESYYKEHLTGGEEWIEKIRKFEKERNMELEKNAFAPNDGYFITSRQIRGWDRVYEKWSKLPESASPEELWKVVAEQQNKMSEGFGDPKVFSFLANRENRDIWRGHSERIYHIAAYNGLQKKLSRTKEQATFTLPDAIEHPLWIRYESPGGTNLNLFKLEEKQKKNYYVTLSKIIWPSEEKWIEKENIEIPLAPSIQFNRQIKLKQHVKGKQEISFSDYSSRISLDGVLGGSRIQFNRKYIKNHKELLGEGDIGPVFFNLVVDVAPLQETRNGRLQSPIGKALKVISSDFSKVIDYKPKELMDWMNTGSASNSFGVASLLEGMRVMSIDMGQRTSASVSIFEVVKELPKDQEQKLFYSINDTELFAIHKRSFLLNLPGEVVTKNNKQQRQERRKKRQFVRSQIRMLANVLRLETKKTPDERKKAIHKLMEIVQSYDSWTASQKEVWEKELNLLTNMAAFNDEIWKESLVELHHRIEPYVGQIVSKWRKGLSEGRKNLAGISMWNIDELEDTRRLLISWSKRSRTPGEANRIETDEPFGSSLLQHIQNVKDDRLKQMANLIIMTALGFKYDKEEKDRYKRWKETYPACQIILFENLNRYLFNLDRSRRENSRLMKWAHRSIPRTVSMQGEMFGLQVGDVRSEYSSRFHAKTGAPGIRCHALTEEDLKAGSNTLKRLIEDGFINESELAYLKKGDIIPSQGGELFVTLSKRYKKDSDNNELTVIHADINAAQNLQKRFWQQNSEVYRVPCQLARMGEDKLYIPKSQTETIKKYFGKGSFVKNNTEQEVYKWEKSEKMKIKTDTTFDLQDLDGFEDISKTIELAQEQQKKYLTMFRDPSGYFFNNETWRPQKEYWSIVNNIIKSCLKKKILSNKVEL

SEQ ID NO: 258 - DNA, 47 bp, synthetic construct
  misc_feature 1..47: note = 5'UTR oligonucleotide sequence
  source 1..47: mol_type = other DNA
gggaaataagagagaaaagaagagtaagaagaaatataagagccacc

SEQ ID NO: 259 - DNA, 101 bp, synthetic construct
  misc_feature 1..101: note = 3'UTR (TriLink standard UTR)polynucleotide sequence
  source 1..101: mol_type = other DNA
gctggagcctcggtggccatgcttcttgccccttgggcctccccccagcccctcctccccttcctgcacccgtacccccgtggtctttgaataaagtctga

SEQ ID NO: 260 - DNA, 3420 bp, Bacillus hisashii
  misc_feature 1..3420: note = bhCas12b (V4) polynucleotide sequence
  source 1..3420: mol_type = genomic DNA
atggccccaaagaagaagcggaaggtcggtatccacggagtcccagcagccgccaccagatccttcatcctgaagatcgagcccaacgaggaagtgaagaaaggcctctggaaaacccacgaggtgctgaaccacggaatcgcctactacatgaatatcctgaagctgatccggcaagaggccatctacgagcaccacgagcaggaccccaagaatcccaagaaggtgtccaaggccgagatccaggccgagctgtgggatttcgtgctgaagatgcagaagtgcaacagcttcacacacgaggtggacaaggacgaggtgttcaacatcctgagagagctgtacgaggaactggtgcccagcagcgtggaaaagaagggcgaagccaaccagctgagcaacaagtttctgtaccctctggtggaccccaacagccagtctggaaagggaacagccagcagcggcagaaagcccagatggtacaacctgaagattgccggcgatccctcctgggaagaagagaagaagaagtgggaagaagataagaaaaaggacccgctggccaagatcctgggcaagctggctgagtacggactgatccctctgttcatcccctacaccgacagcaacgagcccatcgtgaaagaaatcaagtggatggaaaagtcccggaaccagagcgtgcggcggctggataaggacatgttcattcaggccctggaacggttcctgagctgggagagctggaacctgaaagtgaaagaggaatacgagaaggtcgagaaagagtacaagaccctggaagagaggatcaaagaggacatccaggctctgaaggctctggaacagtatgagaaagagcggcaagaacagctgctgcgggacaccctgaacaccaacgagtaccggctgagcaagagaggccttagaggctggcgggaaatcatccagaaatggctgaaaatggacgagaacgagccctccgagaagtacctggaagtgttcaaggactaccagcggaagcaccctagagaggccggcgattacagcgtgtacgagttcctgtccaagaaagagaaccacttcatctggcggaatcaccctgagtacccctacctgtacgccaccttctgcgagatcgacaagaaaaagaaggacgccaagcagcaggccaccttcacactggccgatcctatcaatcaccctctgtgggtccgattcgaggaaagaagcggcagcaacctgaacaagtacagaatcctgaccgagcagctgcacaccgagaagctgaagaaaaagctgacagtgcagctggaccggctgatctaccctacagaatctggcggctgggaagagaagggcaaagtggacattgtgctgctgcccagccggcagttctacaaccagatcttcctggacatcgaggaaaagggcaagcacgccttcacctacaaggatgagagcatcaagttccctctgaagggcacactcggcggagccagagtgcagttcgacagagatcacctgagaagataccctcacaaggtggaaagcggcaacgtgggcagaatctacttcaacatgaccgtgaacatcgagcctacagagtccccagtgtccaagtctctgaagatccaccgggacgacttccccaaggtggtcaacttcaagcccaaagaactgaccgagtggatcaaggacagcaagggcaagaaactgaagtccggcatcgagtccctggaaatcggcctgagagtgatgagcatcgacctgggacagagacaggccgctgccgcctctattttcgaggtggtggatcagaagcccgacatcgaaggcaagctgtttttcccaatcaagggcaccgagctgtatgccgtgcacagagccagcttcaacatcaagctgcccggcgagacactggtcaagagcagagaagtgctgcggaaggccagagaggacaatctgaaactgatgaaccagaagctcaacttcctgcggaacgtgctgcacttccagcagttcgaggacatcaccgagagagagaagcgggtcaccaagtggatcagcagacaagagaacagcgacgtgcccctggtgtaccaggatgagctgatccagatccgcgagctgatgtacaagccttacaaggactgggtcgccttcctgaagcagctccacaagagactggaagtcgagatcggcaaagaagtgaagcactggcggaagtccctgagcgacggaagaaagggcctgtacggcatctccctgaagaacatcgacgagatcgatcggacccggaagttcctgctgagatggtccctgaggcctaccgaacctggcgaagtgcgtagactggaacccggccagagattcgccatcgaccagctgaatcacctgaacgccctgaaagaagatcggctgaagaagatggccaacaccatcatcatgcacgccctgggctactgctacgacgtgcggaagaagaaatggcaggctaagaaccccgcctgccagatcatcctgttcgaggatctgagcaactacaacccctacgaggaaaggtcccgcttcgagaacagcaagctcatgaagtggtccagacgcgagatccccagacaggttgcactgcagggcgagatctatggcctgcaagtgggagaagtgggcgctcagttcagcagcagattccacgccaagacaggcagccctggcatcagatgtagcgtcgtgaccaaagagaagctgcaggacaatcggttcttcaagaatctgcagagagagggcagactgaccctggacaaaatcgccgtgctgaaagagggcgatctgtacccagacaaaggcggcgagaagttcatcagcctgagcaaggatcggaagtgcgtgaccacacacgccgacatcaacgccgctcagaacctgcagaagcggttctggacaagaacccacggcttctacaaggtgtactgcaaggcctaccaggtggacggccagaccgtgtacatccctgagagcaaggaccagaagcagaagatcatcgaagagttcggcgagggctacttcattctgaaggacggggtgtacgaatgggtcaacgccggcaagctgaaaatcaagaagggcagctccaagcagagcagcagcgagctggtggatagcgacatcctgaaagacagcttcgacctggcctccgagctgaaaggcgaaaagctgatgctgtacagggaccccagcggcaatgtgttccccagcgacaaatggatggccgctggcgtgttcttcggaaagctggaacgcatcctgatcagcaagctgaccaaccagtactccatcagcaccatcgaggacgacagcagcaagcagtctatgaaaaggccggcggccacgaaaaaggccggccaggcaaaaaagaaaaag

SEQ ID NO: 261 - protein, 17 aa, synthetic construct
  REGION 1..17: note = synthetic peptide sequence
MAPKKKRKVGIHGVPAA

SEQ ID NO: 262 - DNA, 51 bp, synthetic construct
  misc_feature 1..51: note = synthetic oligonucleotide sequence
  source 1..51: mol_type = other DNA
atggccccaaagaagaagcggaaggtcggtatccacggagtcccagcagcc

SEQ ID NO: 263 - protein, 1554 aa, synthetic construct
  REGION 1..1554: note = 101 Cas9 TadAins 1015 polypeptide sequence
MDKKYSIGLAIGTNSVGWAVITDEYKVPSKKFKVLGNTDRHSIKKNLIGALLFDSGETAEATRLKRTARRRYTRRKNRICYLQEIFSNEMAKVDDSFFHRLEESFLVEEDKKHERHPIFGNIVDEVAYHEKYPTIYHLRKKLVDSTDKADLRLIYLALAHMIKFRGHFLIEGDLNPDNSDVDKLFIQLVQTYNQLFEENPINASGVDAKAILSARLSKSRRLENLIAQLPGEKKNGLFGNLIALSLGLTPNFKSNFDLAEDAKLQLSKDTYDDDLDNLLAQIGDQYADLFLAAKNLSDAILLSDILRVNTEITKAPLSASMIKRYDEHHQDLTLLKALVRQQLPEKYKEIFFDQSKNGYAGYIDGGASQEEFYKFIKPILEKMDGTEELLVKLNREDLLRKQRTFDNGSIPHQIHLGELHAILRRQEDFYPFLKDNREKIEKILTFRIPYYVGPLARGNSRFAWMTRKSEETITPWNFEEVVDKGASAQSFIERMTNFDKNLPNEKVLPKHSLLYEYFTVYNELTKVKYVTEGMRKPAFLSGEQKKAIVDLLFKTNRKVTVKQLKEDYFKKIECFDSVEISGVEDRFNASLGTYHDLLKIIKDKDFLDNEENEDILEDIVLTLTLFEDREMIEERLKTYAHLFDDKVMKQLKRRRYTGWGRLSRKLINGIRDKQSGKTILDFLKSDGFANRNFMQLIHDDSLTFKEDIQKAQVSGQGDSLHEHIANLAGSPAIKKGILQTVKVVDELVKVMGRHKPENIVIEMARENQTTQKGQKNSRERMKRIEEGIKELGSQILKEHPVENTQLQNEKLYLYYLQNGRDMYVDQELDINRLSDYDVDHIVPQSFLKDDSIDNKVLTRSDKNRGKSDNVPSEEVVKKMKNYWRQLLNAKLITQRKFDNLTKAERGGLSELDKAGFIKRQLVETRQITKHVAQILDSRMNTKYDENDKLIREVKVITLKSKLVSDFRKDFQFYKVREINNYHHAHDAYLNAVVGTALIKKYPKLESEFVYGDYKVGSSGSETPGTSESATPESSGSEVEFSHEYWMRHALTLAKRARDEREVPVGAVLVLNNRVIGEGWNRAIGLHDPTAHAEIMALRQGGLVMQNYRLIDATLYVTFEPCVMCAGAMIHSRIGRVVFGVRNAKTGAAGSLMDVLHYPGMNHRVEITEGILADECAALLCYFFRMPRQVFNAQKKAQSSTDYDVRKMIAKSEQEIGKATAKYFFYSNIMNFFKTEITLANGEIRKRPLIETNGETGEIVWDKGRDFATVRKVLSMPQVNIVKKTEVQTGGFSKESILPKRNSDKLIARKKDWDPKKYGGFDSPTVAYSVLVVAKVEKGKSKKLKSVKELLGITIMERSSFEKNPIDFLEAKGYKEVKKDLIIKLPKYSLFELENGRKRMLASAGELQKGNELALPSKYVNFLYLASHYEKLKGSPEDNEQKQLFVEQHKHYLDEIIEQISEFSKRVILADANLDKVLSAYNKHRDKPIREQAENIIHLFTLTNLGAPAAFKYFDTTIDRKRYTSTKEVLDATLIHQSITGLYETRIDLSQLGGD

SEQ ID NO: 264 - protein, 1554 aa, synthetic construct
  REGION 1..1554: note = 102 Cas9 TadAins 1022 polypeptide sequence
MDKKYSIGLAIGTNSVGWAVITDEYKVPSKKFKVLGNTDRHSIKKNLIGALLFDSGETAEATRLKRTARRRYTRRKNRICYLQEIFSNEMAKVDDSFFHRLEESFLVEEDKKHERHPIFGNIVDEVAYHEKYPTIYHLRKKLVDSTDKADLRLIYLALAHMIKFRGHFLIEGDLNPDNSDVDKLFIQLVQTYNQLFEENPINASGVDAKAILSARLSKSRRLENLIAQLPGEKKNGLFGNLIALSLGLTPNFKSNFDLAEDAKLQLSKDTYDDDLDNLLAQIGDQYADLFLAAKNLSDAILLSDILRVNTEITKAPLSASMIKRYDEHHQDLTLLKALVRQQLPEKYKEIFFDQSKNGYAGYIDGGASQEEFYKFIKPILEKMDGTEELLVKLNREDLLRKQRTFDNGSIPHQIHLGELHAILRRQEDFYPFLKDNREKIEKILTFRIPYYVGPLARGNSRFAWMTRKSEETITPWNFEEVVDKGASAQSFIERMTNFDKNLPNEKVLPKHSLLYEYFTVYNELTKVKYVTEGMRKPAFLSGEQKKAIVDLLFKTNRKVTVKQLKEDYFKKIECFDSVEISGVEDRFNASLGTYHDLLKIIKDKDFLDNEENEDILEDIVLTLTLFEDREMIEERLKTYAHLFDDKVMKQLKRRRYTGWGRLSRKLINGIRDKQSGKTILDFLKSDGFANRNFMQLIHDDSLTFKEDIQKAQVSGQGDSLHEHIANLAGSPAIKKGILQTVKVVDELVKVMGRHKPENIVIEMARENQTTQKGQKNSRERMKRIEEGIKELGSQILKEHPVENTQLQNEKLYLYYLQNGRDMYVDQELDINRLSDYDVDHIVPQSFLKDDSIDNKVLTRSDKNRGKSDNVPSEEVVKKMKNYWRQLLNAKLITQRKFDNLTKAERGGLSELDKAGFIKRQLVETRQITKHVAQILDSRMNTKYDENDKLIREVKVITLKSKLVSDFRKDFQFYKVREINNYHHAHDAYLNAVVGTALIKKYPKLESEFVYGDYKVYDVRKMIGSSGSETPGTSESATPESSGSEVEFSHEYWMRHALTLAKRARDEREVPVGAVLVLNNRVIGEGWNRAIGLHDPTAHAEIMALRQGGLVMQNYRLIDATLYVTFEPCVMCAGAMIHSRIGRVVFGVRNAKTGAAGSLMDVLHYPGMNHRVEITEGILADECAALLCYFFRMPRQVFNAQKKAQSSTDAKSEQEIGKATAKYFFYSNIMNFFKTEITLANGEIRKRPLIETNGETGEIVWDKGRDFATVRKVLSMPQVNIVKKTEVQTGGFSKESILPKRNSDKLIARKKDWDPKKYGGFDSPTVAYSVLVVAKVEKGKSKKLKSVKELLGITIMERSSFEKNPIDFLEAKGYKEVKKDLIIKLPKYSLFELENGRKRMLASAGELQKGNELALPSKYVNFLYLASHYEKLKGSPEDNEQKQLFVEQHKHYLDEIIEQISEFSKRVILADANLDKVLSAYNKHRDKPIREQAENIIHLFTLTNLGAPAAFKYFDTTIDRKRYTSTKEVLDATLIHQSITGLYETRIDLSQLGGD

SEQ ID NO: 265 - protein, 1554 aa, synthetic construct
  REGION 1..1554: note = 103 Cas9 TadAins 1029 polypeptide sequence
MDKKYSIGLAIGTNSVGWAVITDEYKVPSKKFKVLGNTDRHSIKKNLIGALLFDSGETAEATRLKRTARRRYTRRKNRICYLQEIFSNEMAKVDDSFFHRLEESFLVEEDKKHERHPIFGNIVDEVAYHEKYPTIYHLRKKLVDSTDKADLRLIYLALAHMIKFRGHFLIEGDLNPDNSDVDKLFIQLVQTYNQLFEENPINASGVDAKAILSARLSKSRRLENLIAQLPGEKKNGLFGNLIALSLGLTPNFKSNFDLAEDAKLQLSKDTYDDDLDNLLAQIGDQYADLFLAAKNLSDAILLSDILRVNTEITKAPLSASMIKRYDEHHQDLTLLKALVRQQLPEKYKEIFFDQSKNGYAGYIDGGASQEEFYKFIKPILEKMDGTEELLVKLNREDLLRKQRTFDNGSIPHQIHLGELHAILRRQEDFYPFLKDNREKIEKILTFRIPYYVGPLARGNSRFAWMTRKSEETITPWNFEEVVDKGASAQSFIERMTNFDKNLPNEKVLPKHSLLYEYFTVYNELTKVKYVTEGMRKPAFLSGEQKKAIVDLLFKTNRKVTVKQLKEDYFKKIECFDSVEISGVEDRFNASLGTYHDLLKIIKDKDFLDNEENEDILEDIVLTLTLFEDREMIEERLKTYAHLFDDKVMKQLKRRRYTGWGRLSRKLINGIRDKQSGKTILDFLKSDGFANRNFMQLIHDDSLTFKEDIQKAQVSGQGDSLHEHIANLAGSPAIKKGILQTVKVVDELVKVMGRHKPENIVIEMARENQTTQKGQKNSRERMKRIEEGIKELGSQILKEHPVENTQLQNEKLYLYYLQNGRDMYVDQELDINRLSDYDVDHIVPQSFLKDDSIDNKVLTRSDKNRGKSDNVPSEEVVKKMKNYWRQLLNAKLITQRKFDNLTKAERGGLSELDKAGFIKRQLVETRQITKHVAQILDSRMNTKYDENDKLIREVKVITLKSKLVSDFRKDFQFYKVREINNYHHAHDAYLNAVVGTALIKKYPKLESEFVYGDYKVYDVRKMIAKSEQEIGSSGSETPGTSESATPESSGSEVEFSHEYWMRHALTLAKRARDEREVPVGAVLVLNNRVIGEGWNRAIGLHDPTAHAEIMALRQGGLVMQNYRLIDATLYVTFEPCVMCAGAMIHSRIGRVVFGVRNAKTGAAGSLMDVLHYPGMNHRVEITEGILADECAALLCYFFRMPRQVFNAQKKAQSSTDGKATAKYFFYSNIMNFFKTEITLANGEIRKRPLIETNGETGEIVWDKGRDFATVRKVLSMPQVNIVKKTEVQTGGFSKESILPKRNSDKLIARKKDWDPKKYGGFDSPTVAYSVLVVAKVEKGKSKKLKSVKELLGITIMERSSFEKNPIDFLEAKGYKEVKKDLIIKLPKYSLFELENGRKRMLASAGELQKGNELALPSKYVNFLYLASHYEKLKGSPEDNEQKQLFVEQHKHYLDEIIEQISEFSKRVILADANLDKVLSAYNKHRDKPIREQAENIIHLFTLTNLGAPAAFKYFDTTIDRKRYTSTKEVLDATLIHQSITGLYETRIDLSQLGGD

SEQ ID NO: 266 - protein, 1554 aa, synthetic construct
  REGION 1..1554: note = 103 Cas9 TadAins 1040 polypeptide sequence
MDKKYSIGLAIGTNSVGWAVITDEYKVPSKKFKVLGNTDRHSIKKNLIGALLFDSGETAEATRLKRTARRRYTRRKNRICYLQEIFSNEMAKVDDSFFHRLEESFLVEEDKKHERHPIFGNIVDEVAYHEKYPTIYHLRKKLVDSTDKADLRLIYLALAHMIKFRGHFLIEGDLNPDNSDVDKLFIQLVQTYNQLFEENPINASGVDAKAILSARLSKSRRLENLIAQLPGEKKNGLFGNLIALSLGLTPNFKSNFDLAEDAKLQLSKDTYDDDLDNLLAQIGDQYADLFLAAKNLSDAILLSDILRVNTEITKAPLSASMIKRYDEHHQDLTLLKALVRQQLPEKYKEIFFDQSKNGYAGYIDGGASQEEFYKFIKPILEKMDGTEELLVKLNREDLLRKQRTFDNGSIPHQIHLGELHAILRRQEDFYPFLKDNREKIEKILTFRIPYYVGPLARGNSRFAWMTRKSEETITPWNFEEVVDKGASAQSFIERMTNFDKNLPNEKVLPKHSLLYEYFTVYNELTKVKYVTEGMRKPAFLSGEQKKAIVDLLFKTNRKVTVKQLKEDYFKKIECFDSVEISGVEDRFNASLGTYHDLLKIIKDKDFLDNEENEDILEDIVLTLTLFEDREMIEERLKTYAHLFDDKVMKQLKRRRYTGWGRLSRKLINGIRDKQSGKTILDFLKSDGFANRNFMQLIHDDSLTFKEDIQKAQVSGQGDSLHEHIANLAGSPAIKKGILQTVKVVDELVKVMGRHKPENIVIEMARENQTTQKGQKNSRERMKRIEEGIKELGSQILKEHPVENTQLQNEKLYLYYLQNGRDMYVDQELDINRLSDYDVDHIVPQSFLKDDSIDNKVLTRSDKNRGKSDNVPSEEVVKKMKNYWRQLLNAKLITQRKFDNLTKAERGGLSELDKAGFIKRQLVETRQITKHVAQILDSRMNTKYDENDKLIREVKVITLKSKLVSDFRKDFQFYKVREINNYHHAHDAYLNAVVGTALIKKYPKLESEFVYGDYKVYDVRKMIAKSEQEIGKATAKYFFYSGSSGSETPGTSESATPESSGSEVEFSHEYWMRHALTLAKRARDEREVPVGAVLVLNNRVIGEGWNRAIGLHDPTAHAEIMALRQGGLVMQNYRLIDATLYVTFEPCVMCAGAMIHSRIGRVVFGVRNAKTGAAGSLMDVLHYPGMNHRVEITEGILADECAALLCYFFRMPRQVFNAQKKAQSSTDNIMNFFKTEITLANGEIRKRPLIETNGETGEIVWDKGRDFATVRKVLSMPQVNIVKKTEVQTGGFSKESILPKRNSDKLIARKKDWDPKKYGGFDSPTVAYSVLVVAKVEKGKSKKLKSVKELLGITIMERSSFEKNPIDFLEAKGYKEVKKDLIIKLPKYSLFELENGRKRMLASAGELQKGNELALPSKYVNFLYLASHYEKLKGSPEDNEQKQLFVEQHKHYLDEIIEQISEFSKRVILADANLDKVLSAYNKHRDKPIREQAENIIHLFTLTNLGAPAAFKYFDTTIDRKRYTSTKEVLDATLIHQSITGLYETRIDLSQLGGD

SEQ ID NO: 267 - protein, 1554 aa, synthetic construct
  REGION 1..1554: note = 105 Cas9 TadAins 1068 polypeptide sequence
MDKKYSIGLAIGTNSVGWAVITDEYKVPSKKFKVLGNTDRHSIKKNLIGALLFDSGETAEATRLKRTARRRYTRRKNRICYLQEIFSNEMAKVDDSFFHRLEESFLVEEDKKHERHPIFGNIVDEVAYHEKYPTIYHLRKKLVDSTDKADLRLIYLALAHMIKFRGHFLIEGDLNPDNSDVDKLFIQLVQTYNQLFEENPINASGVDAKAILSARLSKSRRLENLIAQLPGEKKNGLFGNLIALSLGLTPNFKSNFDLAEDAKLQLSKDTYDDDLDNLLAQIGDQYADLFLAAKNLSDAILLSDILRVNTEITKAPLSASMIKRYDEHHQDLTLLKALVRQQLPEKYKEIFFDQSKNGYAGYIDGGASQEEFYKFIKPILEKMDGTEELLVKLNREDLLRKQRTFDNGSIPHQIHLGELHAILRRQEDFYPFLKDNREKIEKILTFRIPYYVGPLARGNSRFAWMTRKSEETITPWNFEEVVDKGASAQSFIERMTNFDKNLPNEKVLPKHSLLYEYFTVYNELTKVKYVTEGMRKPAFLSGEQKKAIVDLLFKTNRKVTVKQLKEDYFKKIECFDSVEISGVEDRFNASLGTYHDLLKIIKDKDFLDNEENEDILEDIVLTLTLFEDREMIEERLKTYAHLFDDKVMKQLKRRRYTGWGRLSRKLINGIRDKQSGKTILDFLKSDGFANRNFMQLIHDDSLTFKEDIQKAQVSGQGDSLHEHIANLAGSPAIKKGILQTVKVVDELVKVMGRHKPENIVIEMARENQTTQKGQKNSRERMKRIEEGIKELGSQILKEHPVENTQLQNEKLYLYYLQNGRDMYVDQELDINRLSDYDVDHIVPQSFLKDDSIDNKVLTRSDKNRGKSDNVPSEEVVKKMKNYWRQLLNAKLITQRKFDNLTKAERGGLSELDKAGFIKRQLVETRQITKHVAQILDSRMNTKYDENDKLIREVKVITLKSKLVSDFRKDFQFYKVREINNYHHAHDAYLNAVVGTALIKKYPKLESEFVYGDYKVYDVRKMIAKSEQEIGKATAKYFFYSNIMNFFKTEITLANGEIRKRPLIETNGEGSSGSETPGTSESATPESSGSEVEFSHEYWMRHALTLAKRARDEREVPVGAVLVLNNRVIGEGWNRAIGLHDPTAHAEIMALRQGGLVMQNYRLIDATLYVTFEPCVMCAGAMIHSRIGRVVFGVRNAKTGAAGSLMDVLHYPGMNHRVEITEGILADECAALLCYFFRMPRQVFNAQKKAQSSTDTGEIVWDKGRDFATVRKVLSMPQVNIVKKTEVQTGGFSKESILPKRNSDKLIARKKDWDPKKYGGFDSPTVAYSVLVVAKVEKGKSKKLKSVKELLGITIMERSSFEKNPIDFLEAKGYKEVKKDLIIKLPKYSLFELENGRKRMLASAGELQKGNELALPSKYVNFLYLASHYEKLKGSPEDNEQKQLFVEQHKHYLDEIIEQISEFSKRVILADANLDKVLSAYNKHRDKPIREQAENIIHLFTLTNLGAPAAFKYFDTTIDRKRYTSTKEVLDATLIHQSITGLYETRIDLSQLGGD

SEQ ID NO: 268 - protein, 1554 aa, synthetic construct
  REGION 1..1554: note = 106 Cas9 TadAins 1247 polypeptide sequence
MDKKYSIGLAIGTNSVGWAVITDEYKVPSKKFKVLGNTDRHSIKKNLIGALLFDSGETAEATRLKRTARRRYTRRKNRICYLQEIFSNEMAKVDDSFFHRLEESFLVEEDKKHERHPIFGNIVDEVAYHEKYPTIYHLRKKLVDSTDKADLRLIYLALAHMIKFRGHFLIEGDLNPDNSDVDKLFIQLVQTYNQLFEENPINASGVDAKAILSARLSKSRRLENLIAQLPGEKKNGLFGNLIALSLGLTPNFKSNFDLAEDAKLQLSKDTYDDDLDNLLAQIGDQYADLFLAAKNLSDAILLSDILRVNTEITKAPLSASMIKRYDEHHQDLTLLKALVRQQLPEKYKEIFFDQSKNGYAGYIDGGASQEEFYKFIKPILEKMDGTEELLVKLNREDLLRKQRTFDNGSIPHQIHLGELHAILRRQEDFYPFLKDNREKIEKILTFRIPYYVGPLARGNSRFAWMTRKSEETITPWNFEEVVDKGASAQSFIERMTNFDKNLPNEKVLPKHSLLYEYFTVYNELTKVKYVTEGMRKPAFLSGEQKKAIVDLLFKTNRKVTVKQLKEDYFKKIECFDSVEISGVEDRFNASLGTYHDLLKIIKDKDFLDNEENEDILEDIVLTLTLFEDREMIEERLKTYAHLFDDKVMKQLKRRRYTGWGRLSRKLINGIRDKQSGKTILDFLKSDGFANRNFMQLIHDDSLTFKEDIQKAQVSGQGDSLHEHIANLAGSPAIKKGILQTVKVVDELVKVMGRHKPENIVIEMARENQTTQKGQKNSRERMKRIEEGIKELGSQILKEHPVENTQLQNEKLYLYYLQNGRDMYVDQELDINRLSDYDVDHIVPQSFLKDDSIDNKVLTRSDKNRGKSDNVPSEEVVKKMKNYWRQLLNAKLITQRKFDNLTKAERGGLSELDKAGFIKRQLVETRQITKHVAQILDSRMNTKYDENDKLIREVKVITLKSKLVSDFRKDFQFYKVREINNYHHAHDAYLNAVVGTALIKKYPKLESEFVYGDYKVYDVRKMIAKSEQEIGKATAKYFFYSNIMNFFKTEITLANGEIRKRPLIETNGETGEIVWDKGRDFATVRKVLSMPQVNIVKKTEVQTGGFSKESILPKRNSDKLIARKKDWDPKKYGGFDSPTVAYSVLVVAKVEKGKSKKLKSVKELLGITIMERSSFEKNPIDFLEAKGYKEVKKDLIIKLPKYSLFELENGRKRMLASAGELQKGNELALPSKYVNFLYLASHYEKLKGGSSGSETPGTSESATPESSGSEVEFSHEYWMRHALTLAKRARDEREVPVGAVLVLNNRVIGEGWNRAIGLHDPTAHAEIMALRQGGLVMQNYRLIDATLYVTFEPCVMCAGAMIHSRIGRVVFGVRNAKTGAAGSLMDVLHYPGMNHRVEITEGILADECAALLCYFFRMPRQVFNAQKKAQSSTDSPEDNEQKQLFVEQHKHYLDEIIEQISEFSKRVILADANLDKVLSAYNKHRDKPIREQAENIIHLFTLTNLGAPAAFKYFDTTIDRKRYTSTKEVLDATLIHQSITGLYETRIDLSQLGGD

SEQ ID NO: 269 - protein, 1554 aa, synthetic construct
  REGION 1..1554: note = 107 Cas9 TadAins 1054 polypeptide sequence
MDKKYSIGLAIGTNSVGWAVITDEYKVPSKKFKVLGNTDRHSIKKNLIGALLFDSGETAEATRLKRTARRRYTRRKNRICYLQEIFSNEMAKVDDSFFHRLEESFLVEEDKKHERHPIFGNIVDEVAYHEKYPTIYHLRKKLVDSTDKADLRLIYLALAHMIKFRGHFLIEGDLNPDNSDVDKLFIQLVQTYNQLFEENPINASGVDAKAILSARLSKSRRLENLIAQLPGEKKNGLFGNLIALSLGLTPNFKSNFDLAEDAKLQLSKDTYDDDLDNLLAQIGDQYADLFLAAKNLSDAILLSDILRVNTEITKAPLSASMIKRYDEHHQDLTLLKALVRQQLPEKYKEIFFDQSKNGYAGYIDGGASQEEFYKFIKPILEKMDGTEELLVKLNREDLLRKQRTFDNGSIPHQIHLGELHAILRRQEDFYPFLKDNREKIEKILTFRIPYYVGPLARGNSRFAWMTRKSEETITPWNFEEVVDKGASAQSFIERMTNFDKNLPNEKVLPKHSLLYEYFTVYNELTKVKYVTEGMRKPAFLSGEQKKAIVDLLFKTNRKVTVKQLKEDYFKKIECFDSVEISGVEDRFNASLGTYHDLLKIIKDKDFLDNEENEDILEDIVLTLTLFEDREMIEERLKTYAHLFDDKVMKQLKRRRYTGWGRLSRKLINGIRDKQSGKTILDFLKSDGFANRNFMQLIHDDSLTFKEDIQKAQVSGQGDSLHEHIANLAGSPAIKKGILQTVKVVDELVKVMGRHKPENIVIEMARENQTTQKGQKNSRERMKRIEEGIKELGSQILKEHPVENTQLQNEKLYLYYLQNGRDMYVDQELDINRLSDYDVDHIVPQSFLKDDSIDNKVLTRSDKNRGKSDNVPSEEVVKKMKNYWRQLLNAKLITQRKFDNLTKAERGGLSELDKAGFIKRQLVETRQITKHVAQILDSRMNTKYDENDKLIREVKVITLKSKLVSDFRKDFQFYKVREINNYHHAHDAYLNAVVGTALIKKYPKLESEFVYGDYKVYDVRKMIAKSEQEIGKATAKYFFYSNIMNFFKTEITLANGSSGSETPGTSESATPESSGSEVEFSHEYWMRHALTLAKRARDEREVPVGAVLVLNNRVIGEGWNRAIGLHDPTAHAEIMALRQGGLVMQNYRLIDATLYVTFEPCVMCAGAMIHSRIGRVVFGVRNAKTGAAGSLMDVLHYPGMNHRVEITEGILADECAALLCYFFRMPRQVFNAQKKAQSSTDGEIRKRPLIETNGETGEIVWDKGRDFATVRKVLSMPQVNIVKKTEVQTGGFSKESILPKRNSDKLIARKKDWDPKKYGGFDSPTVAYSVLVVAKVEKGKSKKLKSVKELLGITIMERSSFEKNPIDFLEAKGYKEVKKDLIIKLPKYSLFELENGRKRMLASAGELQKGNELALPSKYVNFLYLASHYEKLKGSPEDNEQKQLFVEQHKHYLDEIIEQISEFSKRVILADANLDKVLSAYNKHRDKPIREQAENIIHLFTLTNLGAPAAFKYFDTTIDRKRYTSTKEVLDATLIHQSITGLYETRIDLSQLGGD

SEQ ID NO: 270 - protein, 1554 aa, synthetic construct
  REGION 1..1554: note = 108 Cas9 TadAins 1026 polypeptide sequence
MDKKYSIGLAIGTNSVGWAVITDEYKVPSKKFKVLGNTDRHSIKKNLIGALLFDSGETAEATRLKRTARRRYTRRKNRICYLQEIFSNEMAKVDDSFFHRLEESFLVEEDKKHERHPIFGNIVDEVAYHEKYPTIYHLRKKLVDSTDKADLRLIYLALAHMIKFRGHFLIEGDLNPDNSDVDKLFIQLVQTYNQLFEENPINASGVDAKAILSARLSKSRRLENLIAQLPGEKKNGLFGNLIALSLGLTPNFKSNFDLAEDAKLQLSKDTYDDDLDNLLAQIGDQYADLFLAAKNLSDAILLSDILRVNTEITKAPLSASMIKRYDEHHQDLTLLKALVRQQLPEKYKEIFFDQSKNGYAGYIDGGASQEEFYKFIKPILEKMDGTEELLVKLNREDLLRKQRTFDNGSIPHQIHLGELHAILRRQEDFYPFLKDNREKIEKILTFRIPYYVGPLARGNSRFAWMTRKSEETITPWNFEEVVDKGASAQSFIERMTNFDKNLPNEKVLPKHSLLYEYFTVYNELTKVKYVTEGMRKPAFLSGEQKKAIVDLLFKTNRKVTVKQLKEDYFKKIECFDSVEISGVEDRFNASLGTYHDLLKIIKDKDFLDNEENEDILEDIVLTLTLFEDREMIEERLKTYAHLFDDKVMKQLKRRRYTGWGRLSRKLINGIRDKQSGKTILDFLKSDGFANRNFMQLIHDDSLTFKEDIQKAQVSGQGDSLHEHIANLAGSPAIKKGILQTVKVVDELVKVMGRHKPENIVIEMARENQTTQKGQKNSRERMKRIEEGIKELGSQILKEHPVENTQLQNEKLYLYYLQNGRDMYVDQELDINRLSDYDVDHIVPQSFLKDDSIDNKVLTRSDKNRGKSDNVPSEEVVKKMKNYWRQLLNAKLITQRKFDNLTKAERGGLSELDKAGFIKRQLVETRQITKHVAQILDSRMNTKYDENDKLIREVKVITLKSKLVSDFRKDFQFYKVREINNYHHAHDAYLNAVVGTALIKKYPKLESEFVYGDYKVYDVRKMIAKSEGSSGSETPGTSESATPESSGSEVEFSHEYWMRHALTLAKRARDEREVPVGAVLVLNNRVIGEGWNRAIGLHDPTAHAEIMALRQGGLVMQNYRLIDATLYVTFEPCVMCAGAMIHSRIGRVVFGVRNAKTGAAGSLMDVLHYPGMNHRVEITEGILADECAALLCYFFRMPRQVFNAQKKAQSSTDQEIGKATAKYFFYSNIMNFFKTEITLANGEIRKRPLIETNGETGEIVWDKGRDFATVRKVLSMPQVNIVKKTEVQTGGFSKESILPKRNSDKLIARKKDWDPKKYGGFDSPTVAYSVLVVAKVEKGKSKKLKSVKELLGITIMERSSFEKNPIDFLEAKGYKEVKKDLIIKLPKYSLFELENGRKRMLASAGELQKGNELALPSKYVNFLYLASHYEKLKGSPEDNEQKQLFVEQHKHYLDEIIEQISEFSKRVILADANLDKVLSAYNKHRDKPIREQAENIIHLFTLTNLGAPAAFKYFDTTIDRKRYTSTKEVLDATLIHQSITGLYETRIDLSQLGGD

SEQ ID NO: 271 - protein, 1540 aa, synthetic construct
  REGION 1..1540: note = 109 Cas9 TadAins 768 polypeptide sequence
MDKKYSIGLAIGTNSVGWAVITDEYKVPSKKFKVLGNTDRHSIKKNLIGALLFDSGETAEATRLKRTARRRYTRRKNRICYLQEIFSNEMAKVDDSFFHRLEESFLVEEDKKHERHPIFGNIVDEVAYHEKYPTIYHLRKKLVDSTDKADLRLIYLALAHMIKFRGHFLIEGDLNPDNSDVDKLFIQLVQTYNQLFEENPINASGVDAKAILSARLSKSRRLENLIAQLPGEKKNGLFGNLIALSLGLTPNFKSNFDLAEDAKLQLSKDTYDDDLDNLLAQIGDQYADLFLAAKNLSDAILLSDILRVNTEITKAPLSASMIKRYDEHHQDLTLLKALVRQQLPEKYKEIFFDQSKNGYAGYIDGGASQEEFYKFIKPILEKMDGTEELLVKLNREDLLRKQRTFDNGSIPHQIHLGELHAILRRQEDFYPFLKDNREKIEKILTFRIPYYVGPLARGNSRFAWMTRKSEETITPWNFEEVVDKGASAQSFIERMTNFDKNLPNEKVLPKHSLLYEYFTVYNELTKVKYVTEGMRKPAFLSGEQKKAIVDLLFKTNRKVTVKQLKEDYFKKIECFDSVEISGVEDRFNASLGTYHDLLKIIKDKDFLDNEENEDILEDIVLTLTLFEDREMIEERLKTYAHLFDDKVMKQLKRRRYTGWGRLSRKLINGIRDKQSGKTILDFLKSDGFANRNFMQLIHDDSLTFKEDIQKAQVSGQGDSLHEHIANLAGSPAIKKGILQTVKVVDELVKVMGRHKPENIVIEMARENQGSSGSETPGTSESATPESSGSEVEFSHEYWMRHALTLAKRARDEREVPVGAVLVLNNRVIGEGWNRAIGLHDPTAHAEIMALRQGGLVMQNYRLIDATLYVTFEPCVMCAGAMIHSRIGRVVFGVRNAKTGAAGSLMDVLHYPGMNHRVEITEGILADECAALLCYFFRMPRTTQKGQKNSRERMKRIEEGIKELGSQILKEHPVENTQLQNEKLYLYYLQNGRDMYVDQELDINRLSDYDVDHIVPQSFLKDDSIDNKVLTRSDKNRGKSDNVPSEEVVKKMKNYWRQLLNAKLITQRKFDNLTKAERGGLSELDKAGFIKRQLVETRQITKHVAQILDSRMNTKYDENDKLIREVKVITLKSKLVSDFRKDFQFYKVREINNYHHAHDAYLNAVVGTALIKKYPKLESEFVYGDYKVYDVRKMIAKSEQEIGKATAKYFFYSNIMNFFKTEITLANGEIRKRPLIETNGETGEIVWDKGRDFATVRKVLSMPQVNIVKKTEVQTGGFSKESILPKRNSDKLIARKKDWDPKKYGGFDSPTVAYSVLVVAKVEKGKSKKLKSVKELLGITIMERSSFEKNPIDFLEAKGYKEVKKDLIIKLPKYSLFELENGRKRMLASAGELQKGNELALPSKYVNFLYLASHYEKLKGSPEDNEQKQLFVEQHKHYLDEIIEQISEFSKRVILADANLDKVLSAYNKHRDKPIREQAENIIHLFTLTNLGAPAAFKYFDTTIDRKRYTSTKEVLDATLIHQSITGLYETRIDLSQLGGD

SEQ ID NO: 272 - protein, 1540 aa, synthetic construct
  REGION 1..1540: note = 110.1 Cas9 TadAins 1250 polypeptide sequence
MDKKYSIGLAIGTNSVGWAVITDEYKVPSKKFKVLGNTDRHSIKKNLIGALLFDSGETAEATRLKRTARRRYTRRKNRICYLQEIFSNEMAKVDDSFFHRLEESFLVEEDKKHERHPIFGNIVDEVAYHEKYPTIYHLRKKLVDSTDKADLRLIYLALAHMIKFRGHFLIEGDLNPDNSDVDKLFIQLVQTYNQLFEENPINASGVDAKAILSARLSKSRRLENLIAQLPGEKKNGLFGNLIALSLGLTPNFKSNFDLAEDAKLQLSKDTYDDDLDNLLAQIGDQYADLFLAAKNLSDAILLSDILRVNTEITKAPLSASMIKRYDEHHQDLTLLKALVRQQLPEKYKEIFFDQSKNGYAGYIDGGASQEEFYKFIKPILEKMDGTEELLVKLNREDLLRKQRTFDNGSIPHQIHLGELHAILRRQEDFYPFLKDNREKIEKILTFRIPYYVGPLARGNSRFAWMTRKSEETITPWNFEEVVDKGASAQSFIERMTNFDKNLPNEKVLPKHSLLYEYFTVYNELTKVKYVTEGMRKPAFLSGEQKKAIVDLLFKTNRKVTVKQLKEDYFKKIECFDSVEISGVEDRFNASLGTYHDLLKIIKDKDFLDNEENEDILEDIVLTLTLFEDREMIEERLKTYAHLFDDKVMKQLKRRRYTGWGRLSRKLINGIRDKQSGKTILDFLKSDGFANRNFMQLIHDDSLTFKEDIQKAQVSGQGDSLHEHIANLAGSPAIKKGILQTVKVVDELVKVMGRHKPENIVIEMARENQTTQKGQKNSRERMKRIEEGIKELGSQILKEHPVENTQLQNEKLYLYYLQNGRDMYVDQELDINRLSDYDVDHIVPQSFLKDDSIDNKVLTRSDKNRGKSDNVPSEEVVKKMKNYWRQLLNAKLITQRKFDNLTKAERGGLSELDKAGFIKRQLVETRQITKHVAQILDSRMNTKYDENDKLIREVKVITLKSKLVSDFRKDFQFYKVREINNYHHAHDAYLNAVVGTALIKKYPKLESEFVYGDYKVYDVRKMIAKSEQEIGKATAKYFFYSNIMNFFKTEITLANGEIRKRPLIETNGETGEIVWDKGRDFATVRKVLSMPQVNIVKKTEVQTGGFSKESILPKRNSDKLIARKKDWDPKKYGGFDSPTVAYSVLVVAKVEKGKSKKLKSVKELLGITIMERSSFEKNPIDFLEAKGYKEVKKDLIIKLPKYSLFELENGRKRMLASAGELQKGNELALPSKYVNFLYLASHYEKLKGSPGSSGSETPGTSESATPESSGSEVEFSHEYWMRHALTLAKRARDEREVPVGAVLVLNNRVIGEGWNRAIGLHDPTAHAEIMALRQGGLVMQNYRLIDATLYVTFEPCVMCAGAMIHSRIGRVVFGVRNAKTGAAGSLMDVLHYPGMNHRVEITEGILADECAALLCYFFRMPREDNEQKQLFVEQHKHYLDEIIEQISEFSKRVILADANLDKVLSAYNKHRDKPIREQAENIIHLFTLTNLGAPAAFKYFDTTIDRKRYTSTKEVLDATLIHQSITGLYETRIDLSQLGGD

SEQ ID NO: 273 - protein, 1543 aa, synthetic construct
  REGION 1..1543: note = 110.2 Cas9 TadAins 1250 polypeptide sequence
MDKKYSIGLAIGTNSVGWAVITDEYKVPSKKFKVLGNTDRHSIKKNLIGALLFDSGETAEATRLKRTARRRYTRRKNRICYLQEIFSNEMAKVDDSFFHRLEESFLVEEDKKHERHPIFGNIVDEVAYHEKYPTIYHLRKKLVDSTDKADLRLIYLALAHMIKFRGHFLIEGDLNPDNSDVDKLFIQLVQTYNQLFEENPINASGVDAKAILSARLSKSRRLENLIAQLPGEKKNGLFGNLIALSLGLTPNFKSNFDLAEDAKLQLSKDTYDDDLDNLLAQIGDQYADLFLAAKNLSDAILLSDILRVNTEITKAPLSASMIKRYDEHHQDLTLLKALVRQQLPEKYKEIFFDQSKNGYAGYIDGGASQEEFYKFIKPILEKMDGTEELLVKLNREDLLRKQRTFDNGSIPHQIHLGELHAILRRQEDFYPFLKDNREKIEKILTFRIPYYVGPLARGNSRFAWMTRKSEETITPWNFEEVVDKGASAQSFIERMTNFDKNLPNEKVLPKHSLLYEYFTVYNELTKVKYVTEGMRKPAFLSGEQKKAIVDLLFKTNRKVTVKQLKEDYFKKIECFDSVEISGVEDRFNASLGTYHDLLKIIKDKDFLDNEENEDILEDIVLTLTLFEDREMIEERLKTYAHLFDDKVMKQLKRRRYTGWGRLSRKLINGIRDKQSGKTILDFLKSDGFANRNFMQLIHDDSLTFKEDIQKAQVSGQGDSLHEHIANLAGSPAIKKGILQTVKVVDELVKVMGRHKPENIVIEMARENQTTQKGQKNSRERMKRIEEGIKELGSQILKEHPVENTQLQNEKLYLYYLQNGRDMYVDQELDINRLSDYDVDHIVPQSFLKDDSIDNKVLTRSDKNRGKSDNVPSEEVVKKMKNYWRQLLNAKLITQRKFDNLTKAERGGLSELDKAGFIKRQLVETRQITKHVAQILDSRMNTKYDENDKLIREVKVITLKSKLVSDFRKDFQFYKVREINNYHHAHDAYLNAVVGTALIKKYPKLESEFVYGDYKVYDVRKMIAKSEQEIGKATAKYFFYSNIMNFFKTEITLANGEIRKRPLIETNGETGEIVWDKGRDFATVRKVLSMPQVNIVKKTEVQTGGFSKESILPKRNSDKLIARKKDWDPKKYGGFDSPTVAYSVLVVAKVEKGKSKKLKSVKELLGITIMERSSFEKNPIDFLEAKGYKEVKKDLIIKLPKYSLFELENGRKRMLASAGELQKGNELALPSKYVNFLYLASHYEKLKGSPGSSGSSGSETPGTSESATPESSGSEVEFSHEYWMRHALTLAKRARDEREVPVGAVLVLNNRVIGEGWNRAIGLHDPTAHAEIMALRQGGLVMQNYRLIDATLYVTFEPCVMCAGAMIHSRIGRVVFGVRNAKTGAAGSLMDVLHYPGMNHRVEITEGILADECAALLCYFFRMPREDNEQKQLFVEQHKHYLDEIIEQISEFSKRVILADANLDKVLSAYNKHRDKPIREQAENIIHLFTLTNLGAPAAFKYFDTTIDRKRYTSTKEVLDATLIHQSITGLYETRIDLSQLGGD

SEQ ID NO: 274 - protein, 1546 aa, synthetic construct
  REGION 1..1546: note = 110.3 Cas9 TadAins 1250 polypeptide sequence
MDKKYSIGLAIGTNSVGWAVITDEYKVPSKKFKVLGNTDRHSIKKNLIGALLFDSGETAEATRLKRTARRRYTRRKNRICYLQEIFSNEMAKVDDSFFHRLEESFLVEEDKKHERHPIFGNIVDEVAYHEKYPTIYHLRKKLVDSTDKADLRLIYLALAHMIKFRGHFLIEGDLNPDNSDVDKLFIQLVQTYNQLFEENPINASGVDAKAILSARLSKSRRLENLIAQLPGEKKNGLFGNLIALSLGLTPNFKSNFDLAEDAKLQLSKDTYDDDLDNLLAQIGDQYADLFLAAKNLSDAILLSDILRVNTEITKAPLSASMIKRYDEHHQDLTLLKALVRQQLPEKYKEIFFDQSKNGYAGYIDGGASQEEFYKFIKPILEKMDGTEELLVKLNREDLLRKQRTFDNGSIPHQIHLGELHAILRRQEDFYPFLKDNREKIEKILTFRIPYYVGPLARGNSRFAWMTRKSEETITPWNFEEVVDKGASAQSFIERMTNFDKNLPNEKVLPKHSLLYEYFTVYNELTKVKYVTEGMRKPAFLSGEQKKAIVDLLFKTNRKVTVKQLKEDYFKKIECFDSVEISGVEDRFNASLGTYHDLLKIIKDKDFLDNEENEDILEDIVLTLTLFEDREMIEERLKTYAHLFDDKVMKQLKRRRYTGWGRLSRKLINGIRDKQSGKTILDFLKSDGFANRNFMQLIHDDSLTFKEDIQKAQVSGQGDSLHEHIANLAGSPAIKKGILQTVKVVDELVKVMGRHKPENIVIEMARENQTTQKGQKNSRERMKRIEEGIKELGSQILKEHPVENTQLQNEKLYLYYLQNGRDMYVDQELDINRLSDYDVDHIVPQSFLKDDSIDNKVLTRSDKNRGKSDNVPSEEVVKKMKNYWRQLLNAKLITQRKFDNLTKAERGGLSELDKAGFIKRQLVETRQITKHVAQILDSRMNTKYDENDKLIREVKVITLKSKLVSDFRKDFQFYKVREINNYHHAHDAYLNAVVGTALIKKYPKLESEFVYGDYKVYDVRKMIAKSEQEIGKATAKYFFYSNIMNFFKTEITLANGEIRKRPLIETNGETGEIVWDKGRDFATVRKVLSMPQVNIVKKTEVQTGGFSKESILPKRNSDKLIARKKDWDPKKYGGFDSPTVAYSVLVVAKVEKGKSKKLKSVKELLGITIMERSSFEKNPIDFLEAKGYKEVKKDLIIKLPKYSLFELENGRKRMLASAGELQKGNELALPSKYVNFLYLASHYEKLKGSPGSSGSSGSETPGTSESATPESGSSSGSEVEFSHEYWMRHALTLAKRARDEREVPVGAVLVLNNRVIGEGWNRAIGLHDPTAHAEIMALRQGGLVMQNYRLIDATLYVTFEPCVMCAGAMIHSRIGRVVFGVRNAKTGAAGSLMDVLHYPGMNHRVEITEGILADECAALLCYFFRMPREDNEQKQLFVEQHKHYLDEIIEQISEFSKRVILADANLDKVLSAYNKHRDKPIREQAENIIHLFTLTNLGAPAAFKYFDTTIDRKRYTSTKEVLDATLIHQSITGLYETRIDLSQLGGD

SEQ ID NO: 275 - protein, 1546 aa, synthetic construct
  REGION 1..1546: note = 110.4 Cas9 TadAins 1250 polypeptide sequence
MDKKYSIGLAIGTNSVGWAVITDEYKVPSKKFKVLGNTDRHSIKKNLIGALLFDSGETAEATRLKRTARRRYTRRKNRICYLQEIFSNEMAKVDDSFFHRLEESFLVEEDKKHERHPIFGNIVDEVAYHEKYPTIYHLRKKLVDSTDKADLRLIYLALAHMIKFRGHFLIEGDLNPDNSDVDKLFIQLVQTYNQLFEENPINASGVDAKAILSARLSKSRRLENLIAQLPGEKKNGLFGNLIALSLGLTPNFKSNFDLAEDAKLQLSKDTYDDDLDNLLAQIGDQYADLFLAAKNLSDAILLSDILRVNTEITKAPLSASMIKRYDEHHQDLTLLKALVRQQLPEKYKEIFFDQSKNGYAGYIDGGASQEEFYKFIKPILEKMDGTEELLVKLNREDLLRKQRTFDNGSIPHQIHLGELHAILRRQEDFYPFLKDNREKIEKILTFRIPYYVGPLARGNSRFAWMTRKSEETITPWNFEEVVDKGASAQSFIERMTNFDKNLPNEKVLPKHSLLYEYFTVYNELTKVKYVTEGMRKPAFLSGEQKKAIVDLLFKTNRKVTVKQLKEDYFKKIECFDSVEISGVEDRFNASLGTYHDLLKIIKDKDFLDNEENEDILEDIVLTLTLFEDREMIEERLKTYAHLFDDKVMKQLKRRRYTGWGRLSRKLINGIRDKQSGKTILDFLKSDGFANRNFMQLIHDDSLTFKEDIQKAQVSGQGDSLHEHIANLAGSPAIKKGILQTVKVVDELVKVMGRHKPENIVIEMARENQTTQKGQKNSRERMKRIEEGIKELGSQILKEHPVENTQLQNEKLYLYYLQNGRDMYVDQELDINRLSDYDVDHIVPQSFLKDDSIDNKVLTRSDKNRGKSDNVPSEEVVKKMKNYWRQLLNAKLITQRKFDNLTKAERGGLSELDKAGFIKRQLVETRQITKHVAQILDSRMNTKYDENDKLIREVKVITLKSKLVSDFRKDFQFYKVREINNYHHAHDAYLNAVVGTALIKKYPKLESEFVYGDYKVYDVRKMIAKSEQEIGKATAKYFFYSNIMNFFKTEITLANGEIRKRPLIETNGETGEIVWDKGRDFATVRKVLSMPQVNIVKKTEVQTGGFSKESILPKRNSDKLIARKKDWDPKKYGGFDSPTVAYSVLVVAKVEKGKSKKLKSVKELLGITIMERSSFEKNPIDFLEAKGYKEVKKDLIIKLPKYSLFELENGRKRMLASAGELQKGNELALPSKYVNFLYLASHYEKLKGSPGSSGSSGSETPGTSESATPESGSSSGSEVEFSHEYWMRHALTLAKRARDEREVPVGAVLVLNNRVIGEGWNRAIGLHDPTAHAEIMALRQGGLVMQNYRLIDATLYVTFEPCVMCAGAMIHSRIGRVVFGVRNAKTGAAGSLMDVLHYPGMNHRVEITEGILADECAALLCYFFRMRREDNEQKQLFVEQHKHYLDEIIEQISEFSKRVILADANLDKVLSAYNKHRDKPIREQAENIIHLFTLTNLGAPAAFKYFDTTIDRKRYTSTKEVLDATLIHQSITGLYETRIDLSQLGGD

SEQ ID NO: 276 - protein, 1546 aa, synthetic construct
  REGION 1..1546: note = 110.5 Cas9 TadAins 1249 polypeptide sequence
MDKKYSIGLAIGTNSVGWAVITDEYKVPSKKFKVLGNTDRHSIKKNLIGALLFDSGETAEATRLKRTARRRYTRRKNRICYLQEIFSNEMAKVDDSFFHRLEESFLVEEDKKHERHPIFGNIVDEVAYHEKYPTIYHLRKKLVDSTDKADLRLIYLALAHMIKFRGHFLIEGDLNPDNSDVDKLFIQLVQTYNQLFEENPINASGVDAKAILSARLSKSRRLENLIAQLPGEKKNGLFGNLIALSLGLTPNFKSNFDLAEDAKLQLSKDTYDDDLDNLLAQIGDQYADLFLAAKNLSDAILLSDILRVNTEITKAPLSASMIKRYDEHHQDLTLLKALVRQQLPEKYKEIFFDQSKNGYAGYIDGGASQEEFYKFIKPILEKMDGTEELLVKLNREDLLRKQRTFDNGSIPHQIHLGELHAILRRQEDFYPFLKDNREKIEKILTFRIPYYVGPLARGNSRFAWMTRKSEETITPWNFEEVVDKGASAQSFIERMTNFDKNLPNEKVLPKHSLLYEYFTVYNELTKVKYVTEGMRKPAFLSGEQKKAIVDLLFKTNRKVTVKQLKEDYFKKIECFDSVEISGVEDRFNASLGTYHDLLKIIKDKDFLDNEENEDILEDIVLTLTLFEDREMIEERLKTYAHLFDDKVMKQLKRRRYTGWGRLSRKLINGIRDKQSGKTILDFLKSDGFANRNFMQLIHDDSLTFKEDIQKAQVSGQGDSLHEHIANLAGSPAIKKGILQTVKVVDELVKVMGRHKPENIVIEMARENQTTQKGQKNSRERMKRIEEGIKELGSQILKEHPVENTQLQNEKLYLYYLQNGRDMYVDQELDINRLSDYDVDHIVPQSFLKDDSIDNKVLTRSDKNRGKSDNVPSEEVVKKMKNYWRQLLNAKLITQRKFDNLTKAERGGLSELDKAGFIKRQLVETRQITKHVAQILDSRMNTKYDENDKLIREVKVITLKSKLVSDFRKDFQFYKVREINNYHHAHDAYLNAVVGTALIKKYPKLESEFVYGDYKVYDVRKMIAKSEQEIGKATAKYFFYSNIMNFFKTEITLANGEIRKRPLIETNGETGEIVWDKGRDFATVRKVLSMPQVNIVKKTEVQTGGFSKESILPKRNSDKLIARKKDWDPKKYGGFDSPTVAYSVLVVAKVEKGKSKKLKSVKELLGITIMERSSFEKNPIDFLEAKGYKEVKKDLIIKLPKYSLFELENGRKRMLASAGELQKGNELALPSKYVNFLYLASHYEKLKGSGSSGSSGSETPGTSESATPESGSSSGSEVEFSHEYWMRHALTLAKRARDEREVPVGAVLVLNNRVIGEGWNRAIGLHDPTAHAEIMALRQGGLVMQNYRLIDATLYVTFEPCVMCAGAMIHSRIGRVVFGVRNAKTGAAGSLMDVLHYPGMNHRVEITEGILADECAALLCYFFRMRRPEDNEQKQLFVEQHKHYLDEIIEQISEFSKRVILADANLDKVLSAYNKHRDKPIREQAENIIHLFTLTNLGAPAAFKYFDTTIDRKRYTSTKEVLDATLIHQSITGLYETRIDLSQLGGD

SEQ ID NO: 277 - protein, 1551 aa, synthetic construct
  REGION 1..1551: note = 110.5 Cas9 TadAins delta59-66 1250 polypeptide sequence
MDKKYSIGLAIGTNSVGWAVITDEYKVPSKKFKVLGNTDRHSIKKNLIGALLFDSGETAEATRLKRTARRRYTRRKNRICYLQEIFSNEMAKVDDSFFHRLEESFLVEEDKKHERHPIFGNIVDEVAYHEKYPTIYHLRKKLVDSTDKADLRLIYLALAHMIKFRGHFLIEGDLNPDNSDVDKLFIQLVQTYNQLFEENPINASGVDAKAILSARLSKSRRLENLIAQLPGEKKNGLFGNLIALSLGLTPNFKSNFDLAEDAKLQLSKDTYDDDLDNLLAQIGDQYADLFLAAKNLSDAILLSDILRVNTEITKAPLSASMIKRYDEHHQDLTLLKALVRQQLPEKYKEIFFDQSKNGYAGYIDGGASQEEFYKFIKPILEKMDGTEELLVKLNREDLLRKQRTFDNGSIPHQIHLGELHAILRRQEDFYPFLKDNREKIEKILTFRIPYYVGPLARGNSRFAWMTRKSEETITPWNFEEVVDKGASAQSFIERMTNFDKNLPNEKVLPKHSLLYEYFTVYNELTKVKYVTEGMRKPAFLSGEQKKAIVDLLFKTNRKVTVKQLKEDYFKKIECFDSVEISGVEDRFNASLGTYHDLLKIIKDKDFLDNEENEDILEDIVLTLTLFEDREMIEERLKTYAHLFDDKVMKQLKRRRYTGWGRLSRKLINGIRDKQSGKTILDFLKSDGFANRNFMQLIHDDSLTFKEDIQKAQVSGQGDSLHEHIANLAGSPAIKKGILQTVKVVDELVKVMGRHKPENIVIEMARENQTTQKGQKNSRERMKRIEEGIKELGSQILKEHPVENTQLQNEKLYLYYLQNGRDMYVDQELDINRLSDYDVDHIVPQSFLKDDSIDNKVLTRSDKNRGKSDNVPSEEVVKKMKNYWRQLLNAKLITQRKFDNLTKAERGGLSELDKAGFIKRQLVETRQITKHVAQILDSRMNTKYDENDKLIREVKVITLKSKLVSDFRKDFQFYKVREINNYHHAHDAYLNAVVGTALIKKYPKLESEFVYGDYKVYDVRKMIAKSEQEIGKATAKYFFYSNIMNFFKTEITLANGEIRKRPLIETNGETGEIVWDKGRDFATVRKVLSMPQVNIVKKTEVQTGGFSKESILPKRNSDKLIARKKDWDPKKYGGFDSPTVAYSVLVVAKVEKGKSKKLKSVKELLGITIMERSSFEKNPIDFLEAKGYKEVKKDLIIKLPKYSLFELENGRKRMLASAGELQKGNELALPSKYVNFLYLASHYEKLKGSPGSSGSSGSETPGTSESATPESGSSGSEVEFSHEYWMRHALTLAKRARDEREVPVGAVLVLNNRVIGEGWNRAHAEIMALRQGGLVMQNYRLIDATLYVTFEPCVMCAGAMIHSRIGRVVFGVRNAKTGAAGSLMDVLHYPGMNHRVEITEGILADECAALLCYFFRMPRQVFNAQKKAQSSTDEDNEQKQLFVEQHKHYLDEIIEQISEFSKRVILADANLDKVLSAYNKHRDKPIREQAENIIHLFTLTNLGAPAAFKYFDTTIDRKRYTSTKEVLDATLIHQSITGLYETRIDLSQLGGD

SEQ ID NO: 278 - protein, 1546 aa, synthetic construct
  REGION 1..1546: note = 110.6 Cas9 TadAins 1251 polypeptide sequence
MDKKYSIGLAIGTNSVGWAVITDEYKVPSKKFKVLGNTDRHSIKKNLIGALLFDSGETAEATRLKRTARRRYTRRKNRICYLQEIFSNEMAKVDDSFFHRLEESFLVEEDKKHERHPIFGNIVDEVAYHEKYPTIYHLRKKLVDSTDKADLRLIYLALAHMIKFRGHFLIEGDLNPDNSDVDKLFIQLVQTYNQLFEENPINASGVDAKAILSARLSKSRRLENLIAQLPGEKKNGLFGNLIALSLGLTPNFKSNFDLAEDAKLQLSKDTYDDDLDNLLAQIGDQYADLFLAAKNLSDAILLSDILRVNTEITKAPLSASMIKRYDEHHQDLTLLKALVRQQLPEKYKEIFFDQSKNGYAGYIDGGASQEEFYKFIKPILEKMDGTEELLVKLNREDLLRKQRTFDNGSIPHQIHLGELHAILRRQEDFYPFLKDNREKIEKILTFRIPYYVGPLARGNSRFAWMTRKSEETITPWNFEEVVDKGASAQSFIERMTNFDKNLPNEKVLPKHSLLYEYFTVYNELTKVKYVTEGMRKPAFLSGEQKKAIVDLLFKTNRKVTVKQLKEDYFKKIECFDSVEISGVEDRFNASLGTYHDLLKIIKDKDFLDNEENEDILEDIVLTLTLFEDREMIEERLKTYAHLFDDKVMKQLKRRRYTGWGRLSRKLINGIRDKQSGKTILDFLKSDGFANRNFMQLIHDDSLTFKEDIQKAQVSGQGDSLHEHIANLAGSPAIKKGILQTVKVVDELVKVMGRHKPENIVIEMARENQTTQKGQKNSRERMKRIEEGIKELGSQILKEHPVENTQLQNEKLYLYYLQNGRDMYVDQELDINRLSDYDVDHIVPQSFLKDDSIDNKVLTRSDKNRGKSDNVPSEEVVKKMKNYWRQLLNAKLITQRKFDNLTKAERGGLSELDKAGFIKRQLVETRQITKHVAQILDSRMNTKYDENDKLIREVKVITLKSKLVSDFRKDFQFYKVREINNYHHAHDAYLNAVVGTALIKKYPKLESEFVYGDYKVYDVRKMIAKSEQEIGKATAKYFFYSNIMNFFKTEITLANGEIRKRPLIETNGETGEIVWDKGRDFATVRKVLSMPQVNIVKKTEVQTGGFSKESILPKRNSDKLIARKKDWDPKKYGGFDSPTVAYSVLVVAKVEKGKSKKLKSVKELLGITIMERSSFEKNPIDFLEAKGYKEVKKDLIIKLPKYSLFELENGRKRMLASAGELQKGNELALPSKYVNFLYLASHYEKLKGSPEGSSGSSGSETPGTSESATPESGSSSGSEVEFSHEYWMRHALTLAKRARDEREVPVGAVLVLNNRVIGEGWNRAIGLHDPTAHAEIMALRQGGLVMQNYRLIDATLYVTFEPCVMCAGAMIHSRIGRVVFGVRNAKTGAAGSLMDVLHYPGMNHRVEITEGILADECAALLCYFFRMRRDNEQKQLFVEQHKHYLDEIIEQISEFSKRVILADANLDKVLSAYNKHRDKPIREQAENIIHLFTLTNLGAPAAFKYFDTTIDRKRYTSTKEVLDATLIHQSITGLYETRIDLSQLGGD

SEQ ID NO: 279 - protein, 1546 aa, synthetic construct
  REGION 1..1546: note = 110.7 Cas9 TadAins 1252 polypeptide sequence
MDKKYSIGLAIGTNSVGWAVITDEYKVPSKKFKVLGNTDRHSIKKNLIGALLFDSGETAEATRLKRTARRRYTRRKNRICYLQEIFSNEMAKVDDSFFHRLEESFLVEEDKKHERHPIFGNIVDEVAYHEKYPTIYHLRKKLVDSTDKADLRLIYLALAHMIKFRGHFLIEGDLNPDNSDVDKLFIQLVQTYNQLFEENPINASGVDAKAILSARLSKSRRLENLIAQLPGEKKNGLFGNLIALSLGLTPNFKSNFDLAEDAKLQLSKDTYDDDLDNLLAQIGDQYADLFLAAKNLSDAILLSDILRVNTEITKAPLSASMIKRYDEHHQDLTLLKALVRQQLPEKYKEIFFDQSKNGYAGYIDGGASQEEFYKFIKPILEKMDGTEELLVKLNREDLLRKQRTFDNGSIPHQIHLGELHAILRRQEDFYPFLKDNREKIEKILTFRIPYYVGPLARGNSRFAWMTRKSEETITPWNFEEVVDKGASAQSFIERMTNFDKNLPNEKVLPKHSLLYEYFTVYNELTKVKYVTEGMRKPAFLSGEQKKAIVDLLFKTNRKVTVKQLKEDYFKKIECFDSVEISGVEDRFNASLGTYHDLLKIIKDKDFLDNEENEDILEDIVLTLTLFEDREMIEERLKTYAHLFDDKVMKQLKRRRYTGWGRLSRKLINGIRDKQSGKTILDFLKSDGFANRNFMQLIHDDSLTFKEDIQKAQVSGQGDSLHEHIANLAGSPAIKKGILQTVKVVDELVKVMGRHKPENIVIEMARENQTTQKGQKNSRERMKRIEEGIKELGSQILKEHPVENTQLQNEKLYLYYLQNGRDMYVDQELDINRLSDYDVDHIVPQSFLKDDSIDNKVLTRSDKNRGKSDNVPSEEVVKKMKNYWRQLLNAKLITQRKFDNLTKAERGGLSELDKAGFIKRQLVETRQITKHVAQILDSRMNTKYDENDKLIREVKVITLKSKLVSDFRKDFQFYKVREINNYHHAHDAYLNAVVGTALIKKYPKLESEFVYGDYKVYDVRKMIAKSEQEIGKATAKYFFYSNIMNFFKTEITLANGEIRKRPLIETNGETGEIVWDKGRDFATVRKVLSMPQVNIVKKTEVQTGGFSKESILPKRNSDKLIARKKDWDPKKYGGFDSPTVAYSVLVVAKVEKGKSKKLKSVKELLGITIMERSSFEKNPIDFLEAKGYKEVKKDLIIKLPKYSLFELENGRKRMLASAGELQKGNELALPSKYVNFLYLASHYEKLKGSPEDGSSGSSGSETPGTSESATPESGSSSGSEVEFSHEYWMRHALTLAKRARDEREVPVGAVLVLNNRVIGEGWNRAIGLHDPTAHAEIMALRQGGLVMQNYRLIDATLYVTFEPCVMCAGAMIHSRIGRVVFGVRNAKTGAAGSLMDVLHYPGMNHRVEITEGILADECAALLCYFFRMRRNEQKQLFVEQHKHYLDEIIEQISEFSKRVILADANLDKVLSAYNKHRDKPIREQAENIIHLFTLTNLGAPAAFKYFDTTIDRKRYTSTKEVLDATLIHQSITGLYETRIDLSQLGGD

SEQ ID NO: 280 - protein, 1533 aa, synthetic construct
  REGION 1..1533: note = 110.8 Cas9 TadAins delta59-66 C-truncate 1250 polypeptide sequence
MDKKYSIGLAIGTNSVGWAVITDEYKVPSKKFKVLGNTDRHSIKKNLIGALLFDSGETAEATRLKRTARRRYTRRKNRICYLQEIFSNEMAKVDDSFFHRLEESFLVEEDKKHERHPIFGNIVDEVAYHEKYPTIYHLRKKLVDSTDKADLRLIYLALAHMIKFRGHFLIEGDLNPDNSDVDKLFIQLVQTYNQLFEENPINASGVDAKAILSARLSKSRRLENLIAQLPGEKKNGLFGNLIALSLGLTPNFKSNFDLAEDAKLQLSKDTYDDDLDNLLAQIGDQYADLFLAAKNLSDAILLSDILRVNTEITKAPLSASMIKRYDEHHQDLTLLKALVRQQLPEKYKEIFFDQSKNGYAGYIDGGASQEEFYKFIKPILEKMDGTEELLVKLNREDLLRKQRTFDNGSIPHQIHLGELHAILRRQEDFYPFLKDNREKIEKILTFRIPYYVGPLARGNSRFAWMTRKSEETITPWNFEEVVDKGASAQSFIERMTNFDKNLPNEKVLPKHSLLYEYFTVYNELTKVKYVTEGMRKPAFLSGEQKKAIVDLLFKTNRKVTVKQLKEDYFKKIECFDSVEISGVEDRFNASLGTYHDLLKIIKDKDFLDNEENEDILEDIVLTLTLFEDREMIEERLKTYAHLFDDKVMKQLKRRRYTGWGRLSRKLINGIRDKQSGKTILDFLKSDGFANRNFMQLIHDDSLTFKEDIQKAQVSGQGDSLHEHIANLAGSPAIKKGILQTVKVVDELVKVMGRHKPENIVIEMARENQTTQKGQKNSRERMKRIEEGIKELGSQILKEHPVENTQLQNEKLYLYYLQNGRDMYVDQELDINRLSDYDVDHIVPQSFLKDDSIDNKVLTRSDKNRGKSDNVPSEEVVKKMKNYWRQLLNAKLITQRKFDNLTKAERGGLSELDKAGFIKRQLVETRQITKHVAQILDSRMNTKYDENDKLIREVKVITLKSKLVSDFRKDFQFYKVREINNYHHAHDAYLNAVVGTALIKKYPKLESEFVYGDYKVYDVRKMIAKSEQEIGKATAKYFFYSNIMNFFKTEITLANGEIRKRPLIETNGETGEIVWDKGRDFATVRKVLSMPQVNIVKKTEVQTGGFSKESILPKRNSDKLIARKKDWDPKKYGGFDSPTVAYSVLVVAKVEKGKSKKLKSVKELLGITIMERSSFEKNPIDFLEAKGYKEVKKDLIIKLPKYSLFELENGRKRMLASAGELQKGNELALPSKYVNFLYLASHYEKLKGSPGSSGSETPGTSESATPESSGSEVEFSHEYWMRHALTLAKRARDEREVPVGAVLVLNNRVIGEGWNRAHAEIMALRQGGLVMQNYRLIDATLYVTFEPCVMCAGAMIHSRIGRVVFGVRNAKTGAAGSLMDVLHYPGMNHRVEITEGILADECAALLCYFFRMPRQEDNEQKQLFVEQHKHYLDEIIEQISEFSKRVILADANLDKVLSAYNKHRDKPIREQAENIIHLFTLTNLGAPAAFKYFDTTIDRKRYTSTKEVLDATLIHQSITGLYETRIDLSQLGGD

SEQ ID NO: 281 - protein, 1549 aa, synthetic construct
  REGION 1..1549: note = 111.1 Cas9 TadAins 997 polypeptide sequence
MDKKYSIGLAIGTNSVGWAVITDEYKVPSKKFKVLGNTDRHSIKKNLIGALLFDSGETAEATRLKRTARRRYTRRKNRICYLQEIFSNEMAKVDDSFFHRLEESFLVEEDKKHERHPIFGNIVDEVAYHEKYPTIYHLRKKLVDSTDKADLRLIYLALAHMIKFRGHFLIEGDLNPDNSDVDKLFIQLVQTYNQLFEENPINASGVDAKAILSARLSKSRRLENLIAQLPGEKKNGLFGNLIALSLGLTPNFKSNFDLAEDAKLQLSKDTYDDDLDNLLAQIGDQYADLFLAAKNLSDAILLSDILRVNTEITKAPLSASMIKRYDEHHQDLTLLKALVRQQLPEKYKEIFFDQSKNGYAGYIDGGASQEEFYKFIKPILEKMDGTEELLVKLNREDLLRKQRTFDNGSIPHQIHLGELHAILRRQEDFYPFLKDNREKIEKILTFRIPYYVGPLARGNSRFAWMTRKSEETITPWNFEEVVDKGASAQSFIERMTNFDKNLPNEKVLPKHSLLYEYFTVYNELTKVKYVTEGMRKPAFLSGEQKKAIVDLLFKTNRKVTVKQLKEDYFKKIECFDSVEISGVEDRFNASLGTYHDLLKIIKDKDFLDNEENEDILEDIVLTLTLFEDREMIEERLKTYAHLFDDKVMKQLKRRRYTGWGRLSRKLINGIRDKQSGKTILDFLKSDGFANRNFMQLIHDDSLTFKEDIQKAQVSGQGDSLHEHIANLAGSPAIKKGILQTVKVVDELVKVMGRHKPENIVIEMARENQTTQKGQKNSRERMKRIEEGIKELGSQILKEHPVENTQLQNEKLYLYYLQNGRDMYVDQELDINRLSDYDVDHIVPQSFLKDDSIDNKVLTRSDKNRGKSDNVPSEEVVKKMKNYWRQLLNAKLITQRKFDNLTKAERGGLSELDKAGFIKRQLVETRQITKHVAQILDSRMNTKYDENDKLIREVKVITLKSKLVSDFRKDFQFYKVREINNYHHAHDAYLNAVVGTALSHEYWMRHALTLAKRARDEREVPVGAVLVLNNRVIGEGWNRAIGLHDPTAHAEIMALRQGGLVMQNYRLIDATLYVTFEPCVMCAGAMIHSRIGRVVFGVRNAKTGAAGSLMDVLHYPGMNHRVEITEGILADECAALLCYFFRMPRQVFNAQKKAQSSTDGSSGSETPGTSESATPESSGIKKYPKLESEFVYGDYKVYDVRKMIAKSEQEIGKATAKYFFYSNIMNFFKTEITLANGEIRKRPLIETNGETGEIVWDKGRDFATVRKVLSMPQVNIVKKTEVQTGGFSKESILPKRNSDKLIARKKDWDPKKYGGFDSPTVAYSVLVVAKVEKGKSKKLKSVKELLGITIMERSSFEKNPIDFLEAKGYKEVKKDLIIKLPKYSLFELENGRKRMLASAGELQKGNELALPSKYVNFLYLASHYEKLKGSPEDNEQKQLFVEQHKHYLDEIIEQISEFSKRVILADANLDKVLSAYNKHRDKPIREQAENIIHLFTLTNLGAPAAFKYFDTTIDRKRYTSTKEVLDATLIHQSITGLYETRIDLSQLGGD

SEQ ID NO: 282 - protein, 1555 aa, synthetic construct
  REGION 1..1555: note = 111.2 Cas9 TadAins 997 polypeptide sequence
MDKKYSIGLAIGTNSVGWAVITDEYKVPSKKFKVLGNTDRHSIKKNLIGALLFDSGETAEATRLKRTARRRYTRRKNRICYLQEIFSNEMAKVDDSFFHRLEESFLVEEDKKHERHPIFGNIVDEVAYHEKYPTIYHLRKKLVDSTDKADLRLIYLALAHMIKFRGHFLIEGDLNPDNSDVDKLFIQLVQTYNQLFEENPINASGVDAKAILSARLSKSRRLENLIAQLPGEKKNGLFGNLIALSLGLTPNFKSNFDLAEDAKLQLSKDTYDDDLDNLLAQIGDQYADLFLAAKNLSDAILLSDILRVNTEITKAPLSASMIKRYDEHHQDLTLLKALVRQQLPEKYKEIFFDQSKNGYAGYIDGGASQEEFYKFIKPILEKMDGTEELLVKLNREDLLRKQRTFDNGSIPHQIHLGELHAILRRQEDFYPFLKDNREKIEKILTFRIPYYVGPLARGNSRFAWMTRKSEETITPWNFEEVVDKGASAQSFIERMTNFDKNLPNEKVLPKHSLLYEYFTVYNELTKVKYVTEGMRKPAFLSGEQKKAIVDLLFKTNRKVTVKQLKEDYFKKIECFDSVEISGVEDRFNASLGTYHDLLKIIKDKDFLDNEENEDILEDIVLTLTLFEDREMIEERLKTYAHLFDDKVMKQLKRRRYTGWGRLSRKLINGIRDKQSGKTILDFLKSDGFANRNFMQLIHDDSLTFKEDIQKAQVSGQGDSLHEHIANLAGSPAIKKGILQTVKVVDELVKVMGRHKPENIVIEMARENQTTQKGQKNSRERMKRIEEGIKELGSQILKEHPVENTQLQNEKLYLYYLQNGRDMYVDQELDINRLSDYDVDHIVPQSFLKDDSIDNKVLTRSDKNRGKSDNVPSEEVVKKMKNYWRQLLNAKLITQRKFDNLTKAERGGLSELDKAGFIKRQLVETRQITKHVAQILDSRMNTKYDENDKLIREVKVITLKSKLVSDFRKDFQFYKVREINNYHHAHDAYLNAVVGTALSHEYWMRHALTLAKRARDEREVPVGAVLVLNNRVIGEGWNRAIGLHDPTAHAEIMALRQGGLVMQNYRLIDATLYVTFEPCVMCAGAMIHSRIGRVVFGVRNAKTGAAGSLMDVLHYPGMNHRVEITEGILADECAALLCYFFRMPRQVFNAQKKAQSSTDGSSGSSGSETPGTSESATPESSGGSSIKKYPKLESEFVYGDYKVYDVRKMIAKSEQEIGKATAKYFFYSNIMNFFKTEITLANGEIRKRPLIETNGETGEIVWDKGRDFATVRKVLSMPQVNIVKKTEVQTGGFSKESILPKRNSDKLIARKKDWDPKKYGGFDSPTVAYSVLVVAKVEKGKSKKLKSVKELLGITIMERSSFEKNPIDFLEAKGYKEVKKDLIIKLPKYSLFELENGRKRMLASAGELQKGNELALPSKYVNFLYLASHYEKLKGSPEDNEQKQLFVEQHKHYLDEIIEQISEFSKRVILADANLDKVLSAYNKHRDKPIREQAENIIHLFTLTNLGAPAAFKYFDTTIDRKRYTSTKEVLDATLIHQSITGLYETRIDLSQLGGD

SEQ ID NO: 283 - protein, 1421 aa, synthetic construct
  REGION 1..1421: note = 112 delta HNH TadA polypeptide sequence
MDKKYSIGLAIGTNSVGWAVITDEYKVPSKKFKVLGNTDRHSIKKNLIGALLFDSGETAEATRLKRTARRRYTRRKNRICYLQEIFSNEMAKVDDSFFHRLEESFLVEEDKKHERHPIFGNIVDEVAYHEKYPTIYHLRKKLVDSTDKADLRLIYLALAHMIKFRGHFLIEGDLNPDNSDVDKLFIQLVQTYNQLFEENPINASGVDAKAILSARLSKSRRLENLIAQLPGEKKNGLFGNLIALSLGLTPNFKSNFDLAEDAKLQLSKDTYDDDLDNLLAQIGDQYADLFLAAKNLSDAILLSDILRVNTEITKAPLSASMIKRYDEHHQDLTLLKALVRQQLPEKYKEIFFDQSKNGYAGYIDGGASQEEFYKFIKPILEKMDGTEELLVKLNREDLLRKQRTFDNGSIPHQIHLGELHAILRRQEDFYPFLKDNREKIEKILTFRIPYYVGPLARGNSRFAWMTRKSEETITPWNFEEVVDKGASAQSFIERMTNFDKNLPNEKVLPKHSLLYEYFTVYNELTKVKYVTEGMRKPAFLSGEQKKAIVDLLFKTNRKVTVKQLKEDYFKKIECFDSVEISGVEDRFNASLGTYHDLLKIIKDKDFLDNEENEDILEDIVLTLTLFEDREMIEERLKTYAHLFDDKVMKQLKRRRYTGWGRLSRKLINGIRDKQSGKTILDFLKSDGFANRNFMQLIHDDSLTFKEDIQKAQVSGQGDSLHEHIANLAGSPAIKKGILQTVKVVDELVKVMGRHKPENIVIEMARENQTTQKGQKNSRERMKRIEEGIKELGSEVEFSHEYWMRHALTLAKRARDEREVPVGAVLVLNNRVIGEGWNRAIGLHDPTAHAEIMALRQGGLVMQNYRLIDATLYVTFEPCVMCAGAMIHSRIGRVVFGVRNAKTGAAGSLMDVLHYPGMNHRVEITEGILADECAALLCYFFRMPRQVFNAQKKAQSSTDGGLSELDKAGFIKRQLVETRQITKHVAQILDSRMNTKYDENDKLIREVKVITLKSKLVSDFRKDFQFYKVREINNYHHAHDAYLNAVVGTALIKKYPKLESEFVYGDYKVYDVRKMIAKSEQEIGKATAKYFFYSNIMNFFKTEITLANGEIRKRPLIETNGETGEIVWDKGRDFATVRKVLSMPQVNIVKKTEVQTGGFSKESILPKRNSDKLIARKKDWDPKKYGGFDSPTVAYSVLVVAKVEKGKSKKLKSVKELLGITIMERSSFEKNPIDFLEAKGYKEVKKDLIIKLPKYSLFELENGRKRMLASAGELQKGNELALPSKYVNFLYLASHYEKLKGSPEDNEQKQLFVEQHKHYLDEIIEQISEFSKRVILADANLDKVLSAYNKHRDKPIREQAENIIHLFTLTNLGAPAAFKYFDTTIDRKRYTSTKEVLDATLIHQSITGLYETRIDLSQLGGD

SEQ ID NO: 284 - protein, 1552 aa, synthetic construct
  REGION 1..1552: note = 113 N-term single TadA helixtrunc 165-end polypeptide sequence
MSEVEFSHEYWMRHALTLAKRARDEREVPVGAVLVLNNRVIGEGWNRAIGLHDPTAHAEIMALRQGGLVMQNYRLIDATLYVTFEPCVMCAGAMIHSRIGRVVFGVRNAKTGAAGSLMDVLHYPGMNHRVEITEGILADECAALLCYFFRMPRSGGSSGGSSGSETPGTSESATPESSGGSSGGSDKKYSIGLAIGTNSVGWAVITDEYKVPSKKFKVLGNTDRHSIKKNLIGALLFDSGETAEATRLKRTARRRYTRRKNRICYLQEIFSNEMAKVDDSFFHRLEESFLVEEDKKHERHPIFGNIVDEVAYHEKYPTIYHLRKKLVDSTDKADLRLIYLALAHMIKFRGHFLIEGDLNPDNSDVDKLFIQLVQTYNQLFEENPINASGVDAKAILSARLSKSRRLENLIAQLPGEKKNGLFGNLIALSLGLTPNFKSNFDLAEDAKLQLSKDTYDDDLDNLLAQIGDQYADLFLAAKNLSDAILLSDILRVNTEITKAPLSASMIKRYDEHHQDLTLLKALVRQQLPEKYKEIFFDQSKNGYAGYIDGGASQEEFYKFIKPILEKMDGTEELLVKLNREDLLRKQRTFDNGSIPHQIHLGELHAILRRQEDFYPFLKDNREKIEKILTFRIPYYVGPLARGNSRFAWMTRKSEETITPWNFEEVVDKGASAQSFIERMTNFDKNLPNEKVLPKHSLLYEYFTVYNELTKVKYVTEGMRKPAFLSGEQKKAIVDLLFKTNRKVTVKQLKEDYFKKIECFDSVEISGVEDRFNASLGTYHDLLKIIKDKDFLDNEENEDILEDIVLTLTLFEDREMIEERLKTYAHLFDDKVMKQLKRRRYTGWGRLSRKLINGIRDKQSGKTILDFLKSDGFANRNFMQLIHDDSLTFKEDIQKAQVSGQGDSLHEHIANLAGSPAIKKGILQTVKVVDELVKVMGRHKPENIVIEMARENQTTQKGQKNSRERMKRIEEGIKELGSQILKEHPVENTQLQNEKLYLYYLQNGRDMYVDQELDINRLSDYDVDHIVPQSFLKDDSIDNKVLTRSDKNRGKSDNVPSEEVVKKMKNYWRQLLNAKLITQRKFDNLTKAERGGLSELDKAGFIKRQLVETRQITKHVAQILDSRMNTKYDENDKLIREVKVITLKSKLVSDFRKDFQFYKVREINNYHHAHDAYLNAVVGTALIKKYPKLESEFVYGDYKVYDVRKMIAKSEQEIGKATAKYFFYSNIMNFFKTEITLANGEIRKRPLIETNGETGEIVWDKGRDFATVRKVLSMPQVNIVKKTEVQTGGFSKESILPKRNSDKLIARKKDWDPKKYGGFDSPTVAYSVLVVAKVEKGKSKKLKSVKELLGITIMERSSFEKNPIDFLEAKGYKEVKKDLIIKLPKYSLFELENGRKRMLASAGELQKGNELALPSKYVNFLYLASHYEKLKGSPEDNEQKQLFVEQHKHYLDEIIEQISEFSKRVILADANLDKVLSAYNKHRDKPIREQAENIIHLFTLTNLGAPAAFKYFDTTIDRKRYTSTKEVLDATLIHQSITGLYETRIDLSQLGGD

SEQ ID NO: 285 - protein, 1545 aa, synthetic construct
  REGION 1..1545: note = 114 N-term single TadA helixtrunc 165-end delta 59-65 polypeptide sequence
MSEVEFSHEYWMRHALTLAKRARDEREVPVGAVLVLNNRVIGEGWNRTAHAEIMALRQGGLVMQNYRLIDATLYVTFEPCVMCAGAMIHSRIGRVVFGVRNAKTGAAGSLMDVLHYPGMNHRVEITEGILADECAALLCYFFRMPRSGGSSGGSSGSETPGTSESATPESSGGSSGGSDKKYSIGLAIGTNSVGWAVITDEYKVPSKKFKVLGNTDRHSIKKNLIGALLFDSGETAEATRLKRTARRRYTRRKNRICYLQEIFSNEMAKVDDSFFHRLEESFLVEEDKKHERHPIFGNIVDEVAYHEKYPTIYHLRKKLVDSTDKADLRLIYLALAHMIKFRGHFLIEGDLNPDNSDVDKLFIQLVQTYNQLFEENPINASGVDAKAILSARLSKSRRLENLIAQLPGEKKNGLFGNLIALSLGLTPNFKSNFDLAEDAKLQLSKDTYDDDLDNLLAQIGDQYADLFLAAKNLSDAILLSDILRVNTEITKAPLSASMIKRYDEHHQDLTLLKALVRQQLPEKYKEIFFDQSKNGYAGYIDGGASQEEFYKFIKPILEKMDGTEELLVKLNREDLLRKQRTFDNGSIPHQIHLGELHAILRRQEDFYPFLKDNREKIEKILTFRIPYYVGPLARGNSRFAWMTRKSEETITPWNFEEVVDKGASAQSFIERMTNFDKNLPNEKVLPKHSLLYEYFTVYNELTKVKYVTEGMRKPAFLSGEQKKAIVDLLFKTNRKVTVKQLKEDYFKKIECFDSVEISGVEDRFNASLGTYHDLLKIIKDKDFLDNEENEDILEDIVLTLTLFEDREMIEERLKTYAHLFDDKVMKQLKRRRYTGWGRLSRKLINGIRDKQSGKTILDFLKSDGFANRNFMQLIHDDSLTFKEDIQKAQVSGQGDSLHEHIANLAGSPAIKKGILQTVKVVDELVKVMGRHKPENIVIEMARENQTTQKGQKNSRERMKRIEEGIKELGSQILKEHPVENTQLQNEKLYLYYLQNGRDMYVDQELDINRLSDYDVDHIVPQSFLKDDSIDNKVLTRSDKNRGKSDNVPSEEVVKKMKNYWRQLLNAKLITQRKFDNLTKAERGGLSELDKAGFIKRQLVETRQITKHVAQILDSRMNTKYDENDKLIREVKVITLKSKLVSDFRKDFQFYKVREINNYHHAHDAYLNAVVGTALIKKYPKLESEFVYGDYKVYDVRKMIAKSEQEIGKATAKYFFYSNIMNFFKTEITLANGEIRKRPLIETNGETGEIVWDKGRDFATVRKVLSMPQVNIVKKTEVQTGGFSKESILPKRNSDKLIARKKDWDPKKYGGFDSPTVAYSVLVVAKVEKGKSKKLKSVKELLGITIMERSSFEKNPIDFLEAKGYKEVKKDLIIKLPKYSLFELENGRKRMLASAGELQKGNELALPSKYVNFLYLASHYEKLKGSPEDNEQKQLFVEQHKHYLDEIIEQISEFSKRVILADANLDKVLSAYNKHRDKPIREQAENIIHLFTLTNLGAPAAFKYFDTTIDRKRYTSTKEVLDATLIHQSITGLYETRIDLSQLGGD

SEQ ID NO: 286 - protein, 1541 aa, synthetic construct
  REGION 1..1541: note = 115.1 Cas9 TadAins 1004 polypeptide sequence
MDKKYSIGLAIGTNSVGWAVITDEYKVPSKKFKVLGNTDRHSIKKNLIGALLFDSGETAEATRLKRTARRRYTRRKNRICYLQEIFSNEMAKVDDSFFHRLEESFLVEEDKKHERHPIFGNIVDEVAYHEKYPTIYHLRKKLVDSTDKADLRLIYLALAHMIKFRGHFLIEGDLNPDNSDVDKLFIQLVQTYNQLFEENPINASGVDAKAILSARLSKSRRLENLIAQLPGEKKNGLFGNLIALSLGLTPNFKSNFDLAEDAKLQLSKDTYDDDLDNLLAQIGDQYADLFLAAKNLSDAILLSDILRVNTEITKAPLSASMIKRYDEHHQDLTLLKALVRQQLPEKYKEIFFDQSKNGYAGYIDGGASQEEFYKFIKPILEKMDGTEELLVKLNREDLLRKQRTFDNGSIPHQIHLGELHAILRRQEDFYPFLKDNREKIEKILTFRIPYYVGPLARGNSRFAWMTRKSEETITPWNFEEVVDKGASAQSFIERMTNFDKNLPNEKVLPKHSLLYEYFTVYNELTKVKYVTEGMRKPAFLSGEQKKAIVDLLFKTNRKVTVKQLKEDYFKKIECFDSVEISGVEDRFNASLGTYHDLLKIIKDKDFLDNEENEDILEDIVLTLTLFEDREMIEERLKTYAHLFDDKVMKQLKRRRYTGWGRLSRKLINGIRDKQSGKTILDFLKSDGFANRNFMQLIHDDSLTFKEDIQKAQVSGQGDSLHEHIANLAGSPAIKKGILQTVKVVDELVKVMGRHKPENIVIEMARENQTTQKGQKNSRERMKRIEEGIKELGSQILKEHPVENTQLQNEKLYLYYLQNGRDMYVDQELDINRLSDYDVDHIVPQSFLKDDSIDNKVLTRSDKNRGKSDNVPSEEVVKKMKNYWRQLLNAKLITQRKFDNLTKAERGGLSELDKAGFIKRQLVETRQITKHVAQILDSRMNTKYDENDKLIREVKVITLKSKLVSDFRKDFQFYKVREINNYHHAHDAYLNAVVGTALIKKYPKGSSGSETPGTSESATPESSGSEVEFSHEYWMRHALTLAKRARDEREVPVGAVLVLNNRVIGEGWNRAIGLHDPTAHAEIMALRQGGLVMQNYRLIDATLYVTFEPCVMCAGAMIHSRIGRVVFGVRNAKTGAAGSLMDVLHYPGMNHRVEITEGILADECAALLCYFFRMPRQLESEFVYGDYKVYDVRKMIAKSEQEIGKATAKYFFYSNIMNFFKTEITLANGEIRKRPLIETNGETGEIVWDKGRDFATVRKVLSMPQVNIVKKTEVQTGGFSKESILPKRNSDKLIARKKDWDPKKYGGFDSPTVAYSVLVVAKVEKGKSKKLKSVKELLGITIMERSSFEKNPIDFLEAKGYKEVKKDLIIKLPKYSLFELENGRKRMLASAGELQKGNELALPSKYVNFLYLASHYEKLKGSPEDNEQKQLFVEQHKHYLDEIIEQISEFSKRVILADANLDKVLSAYNKHRDKPIREQAENIIHLFTLTNLGAPAAFKYFDTTIDRKRYTSTKEVLDATLIHQSITGLYETRIDLSQLGGD

SEQ ID NO: 287 - protein, 1541 aa, synthetic construct
  REGION 1..1541: note = 115.2 Cas9 TadAins 1005 polypeptide sequence
MDKKYSIGLAIGTNSVGWAVITDEYKVPSKKFKVLGNTDRHSIKKNLIGALLFDSGETAEATRLKRTARRRYTRRKNRICYLQEIFSNEMAKVDDSFFHRLEESFLVEEDKKHERHPIFGNIVDEVAYHEKYPTIYHLRKKLVDSTDKADLRLIYLALAHMIKFRGHFLIEGDLNPDNSDVDKLFIQLVQTYNQLFEENPINASGVDAKAILSARLSKSRRLENLIAQLPGEKKNGLFGNLIALSLGLTPNFKSNFDLAEDAKLQLSKDTYDDDLDNLLAQIGDQYADLFLAAKNLSDAILLSDILRVNTEITKAPLSASMIKRYDEHHQDLTLLKALVRQQLPEKYKEIFFDQSKNGYAGYIDGGASQEEFYKFIKPILEKMDGTEELLVKLNREDLLRKQRTFDNGSIPHQIHLGELHAILRRQEDFYPFLKDNREKIEKILTFRIPYYVGPLARGNSRFAWMTRKSEETITPWNFEEVVDKGASAQSFIERMTNFDKNLPNEKVLPKHSLLYEYFTVYNELTKVKYVTEGMRKPAFLSGEQKKAIVDLLFKTNRKVTVKQLKEDYFKKIECFDSVEISGVEDRFNASLGTYHDLLKIIKDKDFLDNEENEDILEDIVLTLTLFEDREMIEERLKTYAHLFDDKVMKQLKRRRYTGWGRLSRKLINGIRDKQSGKTILDFLKSDGFANRNFMQLIHDDSLTFKEDIQKAQVSGQGDSLHEHIANLAGSPAIKKGILQTVKVVDELVKVMGRHKPENIVIEMARENQTTQKGQKNSRERMKRIEEGIKELGSQILKEHPVENTQLQNEKLYLYYLQNGRDMYVDQELDINRLSDYDVDHIVPQSFLKDDSIDNKVLTRSDKNRGKSDNVPSEEVVKKMKNYWRQLLNAKLITQRKFDNLTKAERGGLSELDKAGFIKRQLVETRQITKHVAQILDSRMNTKYDENDKLIREVKVITLKSKLVSDFRKDFQFYKVREINNYHHAHDAYLNAVVGTALIKKYPKLGSSGSETPGTSESATPESSGSEVEFSHEYWMRHALTLAKRARDEREVPVGAVLVLNNRVIGEGWNRAIGLHDPTAHAEIMALRQGGLVMQNYRLIDATLYVTFEPCVMCAGAMIHSRIGRVVFGVRNAKTGAAGSLMDVLHYPGMNHRVEITEGILADECAALLCYFFRMPRQESEFVYGDYKVYDVRKMIAKSEQEIGKATAKYFFYSNIMNFFKTEITLANGEIRKRPLIETNGETGEIVWDKGRDFATVRKVLSMPQVNIVKKTEVQTGGFSKESILPKRNSDKLIARKKDWDPKKYGGFDSPTVAYSVLVVAKVEKGKSKKLKSVKELLGITIMERSSFEKNPIDFLEAKGYKEVKKDLIIKLPKYSLFELENGRKRMLASAGELQKGNELALPSKYVNFLYLASHYEKLKGSPEDNEQKQLFVEQHKHYLDEIIEQISEFSKRVILADANLDKVLSAYNKHRDKPIREQAENIIHLFTLTNLGAPAAFKYFDTTIDRKRYTSTKEVLDATLIHQSITGLYETRIDLSQLGGD

SEQ ID NO: 288 - protein, 1541 aa, synthetic construct
  REGION 1..1541: note = 115.3 Cas9 TadAins 1006 polypeptide sequence
MDKKYSIGLAIGTNSVGWAVITDEYKVPSKKFKVLGNTDRHSIKKNLIGALLFDSGETAEATRLKRTARRRYTRRKNRICYLQEIFSNEMAKVDDSFFHRLEESFLVEEDKKHERHPIFGNIVDEVAYHEKYPTIYHLRKKLVDSTDKADLRLIYLALAHMIKFRGHFLIEGDLNPDNSDVDKLFIQLVQTYNQLFEENPINASGVDAKAILSARLSKSRRLENLIAQLPGEKKNGLFGNLIALSLGLTPNFKSNFDLAEDAKLQLSKDTYDDDLDNLLAQIGDQYADLFLAAKNLSDAILLSDILRVNTEITKAPLSASMIKRYDEHHQDLTLLKALVRQQLPEKYKEIFFDQSKNGYAGYIDGGASQEEFYKFIKPILEKMDGTEELLVKLNREDLLRKQRTFDNGSIPHQIHLGELHAILRRQEDFYPFLKDNREKIEKILTFRIPYYVGPLARGNSRFAWMTRKSEETITPWNFEEVVDKGASAQSFIERMTNFDKNLPNEKVLPKHSLLYEYFTVYNELTKVKYVTEGMRKPAFLSGEQKKAIVDLLFKTNRKVTVKQLKEDYFKKIECFDSVEISGVEDRFNASLGTYHDLLKIIKDKDFLDNEENEDILEDIVLTLTLFEDREMIEERLKTYAHLFDDKVMKQLKRRRYTGWGRLSRKLINGIRDKQSGKTILDFLKSDGFANRNFMQLIHDDSLTFKEDIQKAQVSGQGDSLHEHIANLAGSPAIKKGILQTVKVVDELVKVMGRHKPENIVIEMARENQTTQKGQKNSRERMKRIEEGIKELGSQILKEHPVENTQLQNEKLYLYYLQNGRDMYVDQELDINRLSDYDVDHIVPQSFLKDDSIDNKVLTRSDKNRGKSDNVPSEEVVKKMKNYWRQLLNAKLITQRKFDNLTKAERGGLSELDKAGFIKRQLVETRQITKHVAQILDSRMNTKYDENDKLIREVKVITLKSKLVSDFRKDFQFYKVREINNYHHAHDAYLNAVVGTALIKKYPKLEGSSGSETPGTSESATPESSGSEVEFSHEYWMRHALTLAKRARDEREVPVGAVLVLNNRVIGEGWNRAIGLHDPTAHAEIMALRQGGLVMQNYRLIDATLYVTFEPCVMCAGAMIHSRIGRVVFGVRNAKTGAAGSLMDVLHYPGMNHRVEITEGILADECAALLCYFFRMPRQSEFVYGDYKVYDVRKMIAKSEQEIGKATAKYFFYSNIMNFFKTEITLANGEIRKRPLIETNGETGEIVWDKGRDFATVRKVLSMPQVNIVKKTEVQTGGFSKESILPKRNSDKLIARKKDWDPKKYGGFDSPTVAYSVLVVAKVEKGKSKKLKSVKELLGITIMERSSFEKNPIDFLEAKGYKEVKKDLIIKLPKYSLFELENGRKRMLASAGELQKGNELALPSKYVNFLYLASHYEKLKGSPEDNEQKQLFVEQHKHYLDEIIEQISEFSKRVILADANLDKVLSAYNKHRDKPIREQAENIIHLFTLTNLGAPAAFKYFDTTIDRKRYTSTKEVLDATLIHQSITGLYETRIDLSQLGGD

SEQ ID NO: 289 - protein, 1541 aa, synthetic construct
  REGION 1..1541: note = 115.4 Cas9 TadAins 1007 polypeptide sequence
MDKKYSIGLAIGTNSVGWAVITDEYKVPSKKFKVLGNTDRHSIKKNLIGALLFDSGETAEATRLKRTARRRYTRRKNRICYLQEIFSNEMAKVDDSFFHRLEESFLVEEDKKHERHPIFGNIVDEVAYHEKYPTIYHLRKKLVDSTDKADLRLIYLALAHMIKFRGHFLIEGDLNPDNSDVDKLFIQLVQTYNQLFEENPINASGVDAKAILSARLSKSRRLENLIAQLPGEKKNGLFGNLIALSLGLTPNFKSNFDLAEDAKLQLSKDTYDDDLDNLLAQIGDQYADLFLAAKNLSDAILLSDILRVNTEITKAPLSASMIKRYDEHHQDLTLLKALVRQQLPEKYKEIFFDQSKNGYAGYIDGGASQEEFYKFIKPILEKMDGTEELLVKLNREDLLRKQRTFDNGSIPHQIHLGELHAILRRQEDFYPFLKDNREKIEKILTFRIPYYVGPLARGNSRFAWMTRKSEETITPWNFEEVVDKGASAQSFIERMTNFDKNLPNEKVLPKHSLLYEYFTVYNELTKVKYVTEGMRKPAFLSGEQKKAIVDLLFKTNRKVTVKQLKEDYFKKIECFDSVEISGVEDRFNASLGTYHDLLKIIKDKDFLDNEENEDILEDIVLTLTLFEDREMIEERLKTYAHLFDDKVMKQLKRRRYTGWGRLSRKLINGIRDKQSGKTILDFLKSDGFANRNFMQLIHDDSLTFKEDIQKAQVSGQGDSLHEHIANLAGSPAIKKGILQTVKVVDELVKVMGRHKPENIVIEMARENQTTQKGQKNSRERMKRIEEGIKELGSQILKEHPVENTQLQNEKLYLYYLQNGRDMYVDQELDINRLSDYDVDHIVPQSFLKDDSIDNKVLTRSDKNRGKSDNVPSEEVVKKMKNYWRQLLNAKLITQRKFDNLTKAERGGLSELDKAGFIKRQLVETRQITKHVAQILDSRMNTKYDENDKLIREVKVITLKSKLVSDFRKDFQFYKVREINNYHHAHDAYLNAVVGTALIKKYPKLESGSSGSETPGTSESATPESSGSEVEFSHEYWMRHALTLAKRARDEREVPVGAVLVLNNRVIGEGWNRAIGLHDPTAHAEIMALRQGGLVMQNYRLIDATLYVTFEPCVMCAGAMIHSRIGRVVFGVRNAKTGAAGSLMDVLHYPGMNHRVEITEGILADECAALLCYFFRMPRQEFVYGDYKVYDVRKMIAKSEQEIGKATAKYFFYSNIMNFFKTEITLANGEIRKRPLIETNGETGEIVWDKGRDFATVRKVLSMPQVNIVKKTEVQTGGFSKESILPKRNSDKLIARKKDWDPKKYGGFDSPTVAYSVLVVAKVEKGKSKKLKSVKELLGITIMERSSFEKNPIDFLEAKGYKEVKKDLIIKLPKYSLFELENGRKRMLASAGELQKGNELALPSKYVNFLYLASHYEKLKGSPEDNEQKQLFVEQHKHYLDEIIEQISEFSKRVILADANLDKVLSAYNKHRDKPIREQAENIIHLFTLTNLGAPAAFKYFDTTIDRKRYTSTKEVLDATLIHQSITGLYETRIDLSQLGGD

SEQ ID NO: 290 - protein, 1541 aa, synthetic construct
  REGION 1..1541: note = 116.1 Cas9 TadAins C-term truncate 792 polypeptide sequence
MDKKYSIGLAIGTNSVGWAVITDEYKVPSKKFKVLGNTDRHSIKKNLIGALLFDSGETAEATRLKRTARRRYTRRKNRICYLQEIFSNEMAKVDDSFFHRLEESFLVEEDKKHERHPIFGNIVDEVAYHEKYPTIYHLRKKLVDSTDKADLRLIYLALAHMIKFRGHFLIEGDLNPDNSDVDKLFIQLVQTYNQLFEENPINASGVDAKAILSARLSKSRRLENLIAQLPGEKKNGLFGNLIALSLGLTPNFKSNFDLAEDAKLQLSKDTYDDDLDNLLAQIGDQYADLFLAAKNLSDAILLSDILRVNTEITKAPLSASMIKRYDEHHQDLTLLKALVRQQLPEKYKEIFFDQSKNGYAGYIDGGASQEEFYKFIKPILEKMDGTEELLVKLNREDLLRKQRTFDNGSIPHQIHLGELHAILRRQEDFYPFLKDNREKIEKILTFRIPYYVGPLARGNSRFAWMTRKSEETITPWNFEEVVDKGASAQSFIERMTNFDKNLPNEKVLPKHSLLYEYFTVYNELTKVKYVTEGMRKPAFLSGEQKKAIVDLLFKTNRKVTVKQLKEDYFKKIECFDSVEISGVEDRFNASLGTYHDLLKIIKDKDFLDNEENEDILEDIVLTLTLFEDREMIEERLKTYAHLFDDKVMKQLKRRRYTGWGRLSRKLINGIRDKQSGKTILDFLKSDGFANRNFMQLIHDDSLTFKEDIQKAQVSGQGDSLHEHIANLAGSPAIKKGILQTVKVVDELVKVMGRHKPENIVIEMARENQTTQKGQKNSRERMKRIEEGIKELGGSSGSETPGTSESATPESSGSEVEFSHEYWMRHALTLAKRARDEREVPVGAVLVLNNRVIGEGWNRAIGLHDPTAHAEIMALRQGGLVMQNYRLIDATLYVTFEPCVMCAGAMIHSRIGRVVFGVRNAKTGAAGSLMDVLHYPGMNHRVEITEGILADECAALLCYFFRMPRQSQILKEHPVENTQLQNEKLYLYYLQNGRDMYVDQELDINRLSDYDVDHIVPQSFLKDDSIDNKVLTRSDKNRGKSDNVPSEEVVKKMKNYWRQLLNAKLITQRKFDNLTKAERGGLSELDKAGFIKRQLVETRQITKHVAQILDSRMNTKYDENDKLIREVKVITLKSKLVSDFRKDFQFYKVREINNYHHAHDAYLNAVVGTALIKKYPKLESEFVYGDYKVYDVRKMIAKSEQEIGKATAKYFFYSNIMNFFKTEITLANGEIRKRPLIETNGETGEIVWDKGRDFATVRKVLSMPQVNIVKKTEVQTGGFSKESILPKRNSDKLIARKKDWDPKKYGGFDSPTVAYSVLVVAKVEKGKSKKLKSVKELLGITIMERSSFEKNPIDFLEAKGYKEVKKDLIIKLPKYSLFELENGRKRMLASAGELQKGNELALPSKYVNFLYLASHYEKLKGSPEDNEQKQLFVEQHKHYLDEIIEQISEFSKRVILADANLDKVLSAYNKHRDKPIREQAENIIHLFTLTNLGAPAAFKYFDTTIDRKRYTSTKEVLDATLIHQSITGLYETRIDLSQLGGD

SEQ ID NO: 291 - protein, 1541 aa, synthetic construct
  REGION 1..1541: note = 116.2 Cas9 TadAins C-term truncate 791 polypeptide sequence
MDKKYSIGLAIGTNSVGWAVITDEYKVPSKKFKVLGNTDRHSIKKNLIGALLFDSGETAEATRLKRTARRRYTRRKNRICYLQEIFSNEMAKVDDSFFHRLEESFLVEEDKKHERHPIFGNIVDEVAYHEKYPTIYHLRKKLVDSTDKADLRLIYLALAHMIKFRGHFLIEGDLNPDNSDVDKLFIQLVQTYNQLFEENPINASGVDAKAILSARLSKSRRLENLIAQLPGEKKNGLFGNLIALSLGLTPNFKSNFDLAEDAKLQLSKDTYDDDLDNLLAQIGDQYADLFLAAKNLSDAILLSDILRVNTEITKAPLSASMIKRYDEHHQDLTLLKALVRQQLPEKYKEIFFDQSKNGYAGYIDGGASQEEFYKFIKPILEKMDGTEELLVKLNREDLLRKQRTFDNGSIPHQIHLGELHAILRRQEDFYPFLKDNREKIEKILTFRIPYYVGPLARGNSRFAWMTRKSEETITPWNFEEVVDKGASAQSFIERMTNFDKNLPNEKVLPKHSLLYEYFTVYNELTKVKYVTEGMRKPAFLSGEQKKAIVDLLFKTNRKVTVKQLKEDYFKKIECFDSVEISGVEDRFNASLGTYHDLLKIIKDKDFLDNEENEDILEDIVLTLTLFEDREMIEERLKTYAHLFDDKVMKQLKRRRYTGWGRLSRKLINGIRDKQSGKTILDFLKSDGFANRNFMQLIHDDSLTFKEDIQKAQVSGQGDSLHEHIANLAGSPAIKKGILQTVKVVDELVKVMGRHKPENIVIEMARENQTTQKGQKNSRERMKRIEEGIKELGSSGSETPGTSESATPESSGSEVEFSHEYWMRHALTLAKRARDEREVPVGAVLVLNNRVIGEGWNRAIGLHDPTAHAEIMALRQGGLVMQNYRLIDATLYVTFEPCVMCAGAMIHSRIGRVVFGVRNAKTGAAGSLMDVLHYPGMNHRVEITEGILADECAALLCYFFRMPRQGSQILKEHPVENTQLQNEKLYLYYLQNGRDMYVDQELDINRLSDYDVDHIVPQSFLKDDSIDNKVLTRSDKNRGKSDNVPSEEVVKKMKNYWRQLLNAKLITQRKFDNLTKAERGGLSELDKAGFIKRQLVETRQITKHVAQILDSRMNTKYDENDKLIREVKVITLKSKLVSDFRKDFQFYKVREINNYHHAHDAYLNAVVGTALIKKYPKLESEFVYGDYKVYDVRKMIAKSEQEIGKATAKYFFYSNIMNFFKTEITLANGEIRKRPLIETNGETGEIVWDKGRDFATVRKVLSMPQVNIVKKTEVQTGGFSKESILPKRNSDKLIARKKDWDPKKYGGFDSPTVAYSVLVVAKVEKGKSKKLKSVKELLGITIMERSSFEKNPIDFLEAKGYKEVKKDLIIKLPKYSLFELENGRKRMLASAGELQKGNELALPSKYVNFLYLASHYEKLKGSPEDNEQKQLFVEQHKHYLDEIIEQISEFSKRVILADANLDKVLSAYNKHRDKPIREQAENIIHLFTLTNLGAPAAFKYFDTTIDRKRYTSTKEVLDATLIHQSITGLYETRIDLSQLGGD

SEQ ID NO: 292 - protein, 1541 aa, synthetic construct
  REGION 1..1541: note = 116.3 Cas9 TadAins C-term truncate 790 polypeptide sequence
MDKKYSIGLAIGTNSVGWAVITDEYKVPSKKFKVLGNTDRHSIKKNLIGALLFDSGETAEATRLKRTARRRYTRRKNRICYLQEIFSNEMAKVDDSFFHRLEESFLVEEDKKHERHPIFGNIVDEVAYHEKYPTIYHLRKKLVDSTDKADLRLIYLALAHMIKFRGHFLIEGDLNPDNSDVDKLFIQLVQTYNQLFEENPINASGVDAKAILSARLSKSRRLENLIAQLPGEKKNGLFGNLIALSLGLTPNFKSNFDLAEDAKLQLSKDTYDDDLDNLLAQIGDQYADLFLAAKNLSDAILLSDILRVNTEITKAPLSASMIKRYDEHHQDLTLLKALVRQQLPEKYKEIFFDQSKNGYAGYIDGGASQEEFYKFIKPILEKMDGTEELLVKLNREDLLRKQRTFDNGSIPHQIHLGELHAILRRQEDFYPFLKDNREKIEKILTFRIPYYVGPLARGNSRFAWMTRKSEETITPWNFEEVVDKGASAQSFIERMTNFDKNLPNEKVLPKHSLLYEYFTVYNELTKVKYVTEGMRKPAFLSGEQKKAIVDLLFKTNRKVTVKQLKEDYFKKIECFDSVEISGVEDRFNASLGTYHDLLKIIKDKDFLDNEENEDILEDIVLTLTLFEDREMIEERLKTYAHLFDDKVMKQLKRRRYTGWGRLSRKLINGIRDKQSGKTILDFLKSDGFANRNFMQLIHDDSLTFKEDIQKAQVSGQGDSLHEHIANLAGSPAIKKGILQTVKVVDELVKVMGRHKPENIVIEMARENQTTQKGQKNSRERMKRIEEGIKEGSSGSETPGTSESATPESSGSEVEFSHEYWMRHALTLAKRARDEREVPVGAVLVLNNRVIGEGWNRAIGLHDPTAHAEIMALRQGGLVMQNYRLIDATLYVTFEPCVMCAGAMIHSRIGRVVFGVRNAKTGAAGSLMDVLHYPGMNHRVEITEGILADECAALLCYFFRMPRQLGSQILKEHPVENTQLQNEKLYLYYLQNGRDMYVDQELDINRLSDYDVDHIVPQSFLKDDSIDNKVLTRSDKNRGKSDNVPSEEVVKKMKNYWRQLLNAKLITQRKFDNLTKAERGGLSELDKAGFIKRQLVETRQITKHVAQILDSRMNTKYDENDKLIREVKVITLKSKLVSDFRKDFQFYKVREINNYHHAHDAYLNAVVGTALIKKYPKLESEFVYGDYKVYDVRKMIAKSEQEIGKATAKYFFYSNIMNFFKTEITLANGEIRKRPLIETNGETGEIVWDKGRDFATVRKVLSMPQVNIVKKTEVQTGGFSKESILPKRNSDKLIARKKDWDPKKYGGFDSPTVAYSVLVVAKVEKGKSKKLKSVKELLGITIMERSSFEKNPIDFLEAKGYKEVKKDLIIKLPKYSLFELENGRKRMLASAGELQKGNELALPSKYVNFLYLASHYEKLKGSPEDNEQKQLFVEQHKHYLDEIIEQISEFSKRVILADANLDKVLSAYNKHRDKPIREQAENIIHLFTLTNLGAPAAFKYFDTTIDRKRYTSTKEVLDATLIHQSITGLYETRIDLSQLGGD

SEQ ID NO: 293 - protein, 1484 aa, synthetic construct
  REGION 1..1484: note = 117 Cas9 delta 1017-1069 polypeptide sequence
MDKKYSIGLAIGTNSVGWAVITDEYKVPSKKFKVLGNTDRHSIKKNLIGALLFDSGETAEATRLKRTARRRYTRRKNRICYLQEIFSNEMAKVDDSFFHRLEESFLVEEDKKHERHPIFGNIVDEVAYHEKYPTIYHLRKKLVDSTDKADLRLIYLALAHMIKFRGHFLIEGDLNPDNSDVDKLFIQLVQTYNQLFEENPINASGVDAKAILSARLSKSRRLENLIAQLPGEKKNGLFGNLIALSLGLTPNFKSNFDLAEDAKLQLSKDTYDDDLDNLLAQIGDQYADLFLAAKNLSDAILLSDILRVNTEITKAPLSASMIKRYDEHHQDLTLLKALVRQQLPEKYKEIFFDQSKNGYAGYIDGGASQEEFYKFIKPILEKMDGTEELLVKLNREDLLRKQRTFDNGSIPHQIHLGELHAILRRQEDFYPFLKDNREKIEKILTFRIPYYVGPLARGNSRFAWMTRKSEETITPWNFEEVVDKGASAQSFIERMTNFDKNLPNEKVLPKHSLLYEYFTVYNELTKVKYVTEGMRKPAFLSGEQKKAIVDLLFKTNRKVTVKQLKEDYFKKIECFDSVEISGVEDRFNASLGTYHDLLKIIKDKDFLDNEENEDILEDIVLTLTLFEDREMIEERLKTYAHLFDDKVMKQLKRRRYTGWGRLSRKLINGIRDKQSGKTILDFLKSDGFANRNFMQLIHDDSLTFKEDIQKAQVSGQGDSLHEHIANLAGSPAIKKGILQTVKVVDELVKVMGRHKPENIVIEMARENQTTQKGQKNSRERMKRIEEGIKELGSQILKEHPVENTQLQNEKLYLYYLQNGRDMYVDQELDINRLSDYDVDHIVPQSFLKDDSIDNKVLTRSDKNRGKSDNVPSEEVVKKMKNYWRQLLNAKLITQRKFDNLTKAERGGLSELDKAGFIKRQLVETRQITKHVAQILDSRMNTKYDENDKLIREVKVITLKSKLVSDFRKDFQFYKVREINNYHHAHDAYLNAVVGTALIKKYPKLESEFVYGDYKVYSSGSEVEFSHEYWMRHALTLAKRARDEREVPVGAVLVLNNRVIGEGWNRAIGLHDPTAHAEIMALRQGGLVMQNYRLIDATLYVTFEPCVMCAGAMIHSRIGRVVFGVRNAKTGAAGSLMDVLHYPGMNHRVEITEGILADECAALLCYFFRMPRQVFNAQKKAQSSTDGEIVWDKGRDFATVRKVLSMPQVNIVKKTEVQTGGFSKESILPKRNSDKLIARKKDWDPKKYGGFDSPTVAYSVLVVAKVEKGKSKKLKSVKELLGITIMERSSFEKNPIDFLEAKGYKEVKKDLIIKLPKYSLFELENGRKRMLASAGELQKGNELALPSKYVNFLYLASHYEKLKGSPEDNEQKQLFVEQHKHYLDEIIEQISEFSKRVILADANLDKVLSAYNKHRDKPIREQAENIIHLFTLTNLGAPAAFKYFDTTIDRKRYTSTKEVLDATLIHQSITGLYETRIDLSQLGGD

SEQ ID NO: 294 - protein, 1554 aa, synthetic construct
  REGION 1..1554: note = 118 Cas9 TadA-CP116ins 1067 polypeptide sequence
MDKKYSIGLAIGTNSVGWAVITDEYKVPSKKFKVLGNTDRHSIKKNLIGALLFDSGETAEATRLKRTARRRYTRRKNRICYLQEIFSNEMAKVDDSFFHRLEESFLVEEDKKHERHPIFGNIVDEVAYHEKYPTIYHLRKKLVDSTDKADLRLIYLALAHMIKFRGHFLIEGDLNPDNSDVDKLFIQLVQTYNQLFEENPINASGVDAKAILSARLSKSRRLENLIAQLPGEKKNGLFGNLIALSLGLTPNFKSNFDLAEDAKLQLSKDTYDDDLDNLLAQIGDQYADLFLAAKNLSDAILLSDILRVNTEITKAPLSASMIKRYDEHHQDLTLLKALVRQQLPEKYKEIFFDQSKNGYAGYIDGGASQEEFYKFIKPILEKMDGTEELLVKLNREDLLRKQRTFDNGSIPHQIHLGELHAILRRQEDFYPFLKDNREKIEKILTFRIPYYVGPLARGNSRFAWMTRKSEETITPWNFEEVVDKGASAQSFIERMTNFDKNLPNEKVLPKHSLLYEYFTVYNELTKVKYVTEGMRKPAFLSGEQKKAIVDLLFKTNRKVTVKQLKEDYFKKIECFDSVEISGVEDRFNASLGTYHDLLKIIKDKDFLDNEENEDILEDIVLTLTLFEDREMIEERLKTYAHLFDDKVMKQLKRRRYTGWGRLSRKLINGIRDKQSGKTILDFLKSDGFANRNFMQLIHDDSLTFKEDIQKAQVSGQGDSLHEHIANLAGSPAIKKGILQTVKVVDELVKVMGRHKPENIVIEMARENQTTQKGQKNSRERMKRIEEGIKELGSQILKEHPVENTQLQNEKLYLYYLQNGRDMYVDQELDINRLSDYDVDHIVPQSFLKDDSIDNKVLTRSDKNRGKSDNVPSEEVVKKMKNYWRQLLNAKLITQRKFDNLTKAERGGLSELDKAGFIKRQLVETRQITKHVAQILDSRMNTKYDENDKLIREVKVITLKSKLVSDFRKDFQFYKVREINNYHHAHDAYLNAVVGTALIKKYPKLESEFVYGDYKVYDVRKMIAKSEQEIGKATAKYFFYSNIMNFFKTEITLANGEIRKRPLIETNMNHRVEITEGILADECAALLCYFFRMPRQVFNAQKKAQSSTDGSSGSETPGTSESATPESSGSEVEFSHEYWMRHALTLAKRARDEREVPVGAVLVLNNRVIGEGWNRAIGLHDPTAHAEIMALRQGGLVMQNYRLIDATLYVTFEPCVMCAGAMIHSRIGRVVFGVRNAKTGAAGSLMDVLHYPGGETGEIVWDKGRDFATVRKVLSMPQVNIVKKTEVQTGGFSKESILPKRNSDKLIARKKDWDPKKYGGFDSPTVAYSVLVVAKVEKGKSKKLKSVKELLGITIMERSSFEKNPIDFLEAKGYKEVKKDLIIKLPKYSLFELENGRKRMLASAGELQKGNELALPSKYVNFLYLASHYEKLKGSPEDNEQKQLFVEQHKHYLDEIIEQISEFSKRVILADANLDKVLSAYNKHRDKPIREQAENIIHLFTLTNLGAPAAFKYFDTTIDRKRYTSTKEVLDATLIHQSITGLYETRIDLSQLGGD

SEQ ID NO: 295 - protein, 1554 aa, synthetic construct
  REGION 1..1554: note = 119 Cas9 TadAins 701 polypeptide sequence
MDKKYSIGLAIGTNSVGWAVITDEYKVPSKKFKVLGNTDRHSIKKNLIGALLFDSGETAEATRLKRTARRRYTRRKNRICYLQEIFSNEMAKVDDSFFHRLEESFLVEEDKKHERHPIFGNIVDEVAYHEKYPTIYHLRKKLVDSTDKADLRLIYLALAHMIKFRGHFLIEGDLNPDNSDVDKLFIQLVQTYNQLFEENPINASGVDAKAILSARLSKSRRLENLIAQLPGEKKNGLFGNLIALSLGLTPNFKSNFDLAEDAKLQLSKDTYDDDLDNLLAQIGDQYADLFLAAKNLSDAILLSDILRVNTEITKAPLSASMIKRYDEHHQDLTLLKALVRQQLPEKYKEIFFDQSKNGYAGYIDGGASQEEFYKFIKPILEKMDGTEELLVKLNREDLLRKQRTFDNGSIPHQIHLGELHAILRRQEDFYPFLKDNREKIEKILTFRIPYYVGPLARGNSRFAWMTRKSEETITPWNFEEVVDKGASAQSFIERMTNFDKNLPNEKVLPKHSLLYEYFTVYNELTKVKYVTEGMRKPAFLSGEQKKAIVDLLFKTNRKVTVKQLKEDYFKKIECFDSVEISGVEDRFNASLGTYHDLLKIIKDKDFLDNEENEDILEDIVLTLTLFEDREMIEERLKTYAHLFDDKVMKQLKRRRYTGWGRLSRKLINGIRDKQSGKTILDFLKSDGFANRNFMQLIHDDSGSSGSETPGTSESATPESSGSEVEFSHEYWMRHALTLAKRARDEREVPVGAVLVLNNRVIGEGWNRAIGLHDPTAHAEIMALRQGGLVMQNYRLIDATLYVTFEPCVMCAGAMIHSRIGRVVFGVRNAKTGAAGSLMDVLHYPGMNHRVEITEGILADECAALLCYFFRMPRQVFNAQKKAQSSTDLTFKEDIQKAQVSGQGDSLHEHIANLAGSPAIKKGILQTVKVVDELVKVMGRHKPENIVIEMARENQTTQKGQKNSRERMKRIEEGIKELGSQILKEHPVENTQLQNEKLYLYYLQNGRDMYVDQELDINRLSDYDVDHIVPQSFLKDDSIDNKVLTRSDKNRGKSDNVPSEEVVKKMKNYWRQLLNAKLITQRKFDNLTKAERGGLSELDKAGFIKRQLVETRQITKHVAQILDSRMNTKYDENDKLIREVKVITLKSKLVSDFRKDFQFYKVREINNYHHAHDAYLNAVVGTALIKKYPKLESEFVYGDYKVYDVRKMIAKSEQEIGKATAKYFFYSNIMNFFKTEITLANGEIRKRPLIETNGETGEIVWDKGRDFATVRKVLSMPQVNIVKKTEVQTGGFSKESILPKRNSDKLIARKKDWDPKKYGGFDSPTVAYSVLVVAKVEKGKSKKLKSVKELLGITIMERSSFEKNPIDFLEAKGYKEVKKDLIIKLPKYSLFELENGRKRMLASAGELQKGNELALPSKYVNFLYLASHYEKLKGSPEDNEQKQLFVEQHKHYLDEIIEQISEFSKRVILADANLDKVLSAYNKHRDKPIREQAENIIHLFTLTNLGAPAAFKYFDTTIDRKRYTSTKEVLDATLIHQSITGLYETRIDLSQLGGD

SEQ ID NO: 296 - protein, 1554 aa, synthetic construct
  REGION 1..1554: note = 120 Cas9 TadACP136ins 1248 polypeptide sequence
MDKKYSIGLAIGTNSVGWAVITDEYKVPSKKFKVLGNTDRHSIKKNLIGALLFDSGETAEATRLKRTARRRYTRRKNRICYLQEIFSNEMAKVDDSFFHRLEESFLVEEDKKHERHPIFGNIVDEVAYHEKYPTIYHLRKKLVDSTDKADLRLIYLALAHMIKFRGHFLIEGDLNPDNSDVDKLFIQLVQTYNQLFEENPINASGVDAKAILSARLSKSRRLENLIAQLPGEKKNGLFGNLIALSLGLTPNFKSNFDLAEDAKLQLSKDTYDDDLDNLLAQIGDQYADLFLAAKNLSDAILLSDILRVNTEITKAPLSASMIKRYDEHHQDLTLLKALVRQQLPEKYKEIFFDQSKNGYAGYIDGGASQEEFYKFIKPILEKMDGTEELLVKLNREDLLRKQRTFDNGSIPHQIHLGELHAILRRQEDFYPFLKDNREKIEKILTFRIPYYVGPLARGNSRFAWMTRKSEETITPWNFEEVVDKGASAQSFIERMTNFDKNLPNEKVLPKHSLLYEYFTVYNELTKVKYVTEGMRKPAFLSGEQKKAIVDLLFKTNRKVTVKQLKEDYFKKIECFDSVEISGVEDRFNASLGTYHDLLKIIKDKDFLDNEENEDILEDIVLTLTLFEDREMIEERLKTYAHLFDDKVMKQLKRRRYTGWGRLSRKLINGIRDKQSGKTILDFLKSDGFANRNFMQLIHDDSLTFKEDIQKAQVSGQGDSLHEHIANLAGSPAIKKGILQTVKVVDELVKVMGRHKPENIVIEMARENQTTQKGQKNSRERMKRIEEGIKELGSQILKEHPVENTQLQNEKLYLYYLQNGRDMYVDQELDINRLSDYDVDHIVPQSFLKDDSIDNKVLTRSDKNRGKSDNVPSEEVVKKMKNYWRQLLNAKLITQRKFDNLTKAERGGLSELDKAGFIKRQLVETRQITKHVAQILDSRMNTKYDENDKLIREVKVITLKSKLVSDFRKDFQFYKVREINNYHHAHDAYLNAVVGTALIKKYPKLESEFVYGDYKVYDVRKMIAKSEQEIGKATAKYFFYSNIMNFFKTEITLANGEIRKRPLIETNGETGEIVWDKGRDFATVRKVLSMPQVNIVKKTEVQTGGFSKESILPKRNSDKLIARKKDWDPKKYGGFDSPTVAYSVLVVAKVEKGKSKKLKSVKELLGITIMERSSFEKNPIDFLEAKGYKEVKKDLIIKLPKYSLFELENGRKRMLASAGELQKGNELALPSKYVNFLYLASHYEKLKGSMNHRVEITEGILADECAALLCYFFRMPRQVFNAQKKAQSSTDGSSGSETPGTSESATPESSGSEVEFSHEYWMRHALTLAKRARDEREVPVGAVLVLNNRVIGEGWNRAIGLHDPTAHAEIMALRQGGLVMQNYRLIDATLYVTFEPCVMCAGAMIHSRIGRVVFGVRNAKTGAAGSLMDVLHYPGPEDNEQKQLFVEQHKHYLDEIIEQISEFSKRVILADANLDKVLSAYNKHRDKPIREQAENIIHLFTLTNLGAPAAFKYFDTTIDRKRYTSTKEVLDATLIHQSITGLYETRIDLSQLGGD

SEQ ID NO: 297 - protein, 1554 aa, synthetic construct
  REGION 1..1554: note = 121 Cas9 TadACP136ins 1052 polypeptide sequence
MDKKYSIGLAIGTNSVGWAVITDEYKVPSKKFKVLGNTDRHSIKKNLIGALLFDSGETAEATRLKRTARRRYTRRKNRICYLQEIFSNEMAKVDDSFFHRLEESFLVEEDKKHERHPIFGNIVDEVAYHEKYPTIYHLRKKLVDSTDKADLRLIYLALAHMIKFRGHFLIEGDLNPDNSDVDKLFIQLVQTYNQLFEENPINASGVDAKAILSARLSKSRRLENLIAQLPGEKKNGLFGNLIALSLGLTPNFKSNFDLAEDAKLQLSKDTYDDDLDNLLAQIGDQYADLFLAAKNLSDAILLSDILRVNTEITKAPLSASMIKRYDEHHQDLTLLKALVRQQLPEKYKEIFFDQSKNGYAGYIDGGASQEEFYKFIKPILEKMDGTEELLVKLNREDLLRKQRTFDNGSIPHQIHLGELHAILRRQEDFYPFLKDNREKIEKILTFRIPYYVGPLARGNSRFAWMTRKSEETITPWNFEEVVDKGASAQSFIERMTNFDKNLPNEKVLPKHSLLYEYFTVYNELTKVKYVTEGMRKPAFLSGEQKKAIVDLLFKTNRKVTVKQLKEDYFKKIECFDSVEISGVEDRFNASLGTYHDLLKIIKDKDFLDNEENEDILEDIVLTLTLFEDREMIEERLKTYAHLFDDKVMKQLKRRRYTGWGRLSRKLINGIRDKQSGKTILDFLKSDGFANRNFMQLIHDDSLTFKEDIQKAQVSGQGDSLHEHIANLAGSPAIKKGILQTVKVVDELVKVMGRHKPENIVIEMARENQTTQKGQKNSRERMKRIEEGIKELGSQILKEHPVENTQLQNEKLYLYYLQNGRDMYVDQELDINRLSDYDVDHIVPQSFLKDDSIDNKVLTRSDKNRGKSDNVPSEEVVKKMKNYWRQLLNAKLITQRKFDNLTKAERGGLSELDKAGFIKRQLVETRQITKHVAQILDSRMNTKYDENDKLIREVKVITLKSKLVSDFRKDFQFYKVREINNYHHAHDAYLNAVVGTALIKKYPKLESEFVYGDYKVYDVRKMIAKSEQEIGKATAKYFFYSNIMNFFKTEITLAMNHRVEITEGILADECAALLCYFFRMPRQVFNAQKKAQSSTDGSSGSETPGTSESATPESSGSEVEFSHEYWMRHALTLAKRARDEREVPVGAVLVLNNRVIGEGWNRAIGLHDPTAHAEIMALRQGGLVMQNYRLIDATLYVTFEPCVMCAGAMIHSRIGRVVFGVRNAKTGAAGSLMDVLHYPGNGEIRKRPLIETNGETGEIVWDKGRDFATVRKVLSMPQVNIVKKTEVQTGGFSKESILPKRNSDKLIARKKDWDPKKYGGFDSPTVAYSVLVVAKVEKGKSKKLKSVKELLGITIMERSSFEKNPIDFLEAKGYKEVKKDLIIKLPKYSLFELENGRKRMLASAGELQKGNELALPSKYVNFLYLASHYEKLKGSPEDNEQKQLFVEQHKHYLDEIIEQISEFSKRVILADANLDKVLSAYNKHRDKPIREQAENIIHLFTLTNLGAPAAFKYFDTTIDRKRYTSTKEVLDATLIHQSITGLYETRIDLSQLGGD

SEQ ID NO: 298 - protein, 1554 aa, synthetic construct
  REGION 1..1554: note = 122 Cas9 TadACP136ins 1041 polypeptide sequence
MDKKYSIGLAIGTNSVGWAVITDEYKVPSKKFKVLGNTDRHSIKKNLIGALLFDSGETAEATRLKRTARRRYTRRKNRICYLQEIFSNEMAKVDDSFFHRLEESFLVEEDKKHERHPIFGNIVDEVAYHEKYPTIYHLRKKLVDSTDKADLRLIYLALAHMIKFRGHFLIEGDLNPDNSDVDKLFIQLVQTYNQLFEENPINASGVDAKAILSARLSKSRRLENLIAQLPGEKKNGLFGNLIALSLGLTPNFKSNFDLAEDAKLQLSKDTYDDDLDNLLAQIGDQYADLFLAAKNLSDAILLSDILRVNTEITKAPLSASMIKRYDEHHQDLTLLKALVRQQLPEKYKEIFFDQSKNGYAGYIDGGASQEEFYKFIKPILEKMDGTEELLVKLNREDLLRKQRTFDNGSIPHQIHLGELHAILRRQEDFYPFLKDNREKIEKILTFRIPYYVGPLARGNSRFAWMTRKSEETITPWNFEEVVDKGASAQSFIERMTNFDKNLPNEKVLPKHSLLYEYFTVYNELTKVKYVTEGMRKPAFLSGEQKKAIVDLLFKTNRKVTVKQLKEDYFKKIECFDSVEISGVEDRFNASLGTYHDLLKIIKDKDFLDNEENEDILEDIVLTLTLFEDREMIEERLKTYAHLFDDKVMKQLKRRRYTGWGRLSRKLINGIRDKQSGKTILDFLKSDGFANRNFMQLIHDDSLTFKEDIQKAQVSGQGDSLHEHIANLAGSPAIKKGILQTVKVVDELVKVMGRHKPENIVIEMARENQTTQKGQKNSRERMKRIEEGIKELGSQILKEHPVENTQLQNEKLYLYYLQNGRDMYVDQELDINRLSDYDVDHIVPQSFLKDDSIDNKVLTRSDKNRGKSDNVPSEEVVKKMKNYWRQLLNAKLITQRKFDNLTKAERGGLSELDKAGFIKRQLVETRQITKHVAQILDSRMNTKYDENDKLIREVKVITLKSKLVSDFRKDFQFYKVREINNYHHAHDAYLNAVVGTALIKKYPKLESEFVYGDYKVYDVRKMIAKSEQEIGKATAKYFFYSMNHRVEITEGILADECAALLCYFFRMPRQVFNAQKKAQSSTDGSSGSETPGTSESATPESSGSEVEFSHEYWMRHALTLAKRARDEREVPVGAVLVLNNRVIGEGWNRAIGLHDPTAHAEIMALRQGGLVMQNYRLIDATLYVTFEPCVMCAGAMIHSRIGRVVFGVRNAKTGAAGSLMDVLHYPGNIMNFFKTEITLANGEIRKRPLIETNGETGEIVWDKGRDFATVRKVLSMPQVNIVKKTEVQTGGFSKESILPKRNSDKLIARKKDWDPKKYGGFDSPTVAYSVLVVAKVEKGKSKKLKSVKELLGITIMERSSFEKNPIDFLEAKGYKEVKKDLIIKLPKYSLFELENGRKRMLASAGELQKGNELALPSKYVNFLYLASHYEKLKGSPEDNEQKQLFVEQHKHYLDEIIEQISEFSKRVILADANLDKVLSAYNKHRDKPIREQAENIIHLFTLTNLGAPAAFKYFDTTIDRKRYTSTKEVLDATLIHQSITGLYETRIDLSQLGGD

SEQ ID NO: 299 - protein, 1554 aa, synthetic construct
  REGION 1..1554: note = 123 Cas9 TadACP139ins 1299 polypeptide sequence
MDKKYSIGLAIGTNSVGWAVITDEYKVPSKKFKVLGNTDRHSIKKNLIGALLFDSGETAEATRLKRTARRRYTRRKNRICYLQEIFSNEMAKVDDSFFHRLEESFLVEEDKKHERHPIFGNIVDEVAYHEKYPTIYHLRKKLVDSTDKADLRLIYLALAHMIKFRGHFLIEGDLNPDNSDVDKLFIQLVQTYNQLFEENPINASGVDAKAILSARLSKSRRLENLIAQLPGEKKNGLFGNLIALSLGLTPNFKSNFDLAEDAKLQLSKDTYDDDLDNLLAQIGDQYADLFLAAKNLSDAILLSDILRVNTEITKAPLSASMIKRYDEHHQDLTLLKALVRQQLPEKYKEIFFDQSKNGYAGYIDGGASQEEFYKFIKPILEKMDGTEELLVKLNREDLLRKQRTFDNGSIPHQIHLGELHAILRRQEDFYPFLKDNREKIEKILTFRIPYYVGPLARGNSRFAWMTRKSEETITPWNFEEVVDKGASAQSFIERMTNFDKNLPNEKVLPKHSLLYEYFTVYNELTKVKYVTEGMRKPAFLSGEQKKAIVDLLFKTNRKVTVKQLKEDYFKKIECFDSVEISGVEDRFNASLGTYHDLLKIIKDKDFLDNEENEDILEDIVLTLTLFEDREMIEERLKTYAHLFDDKVMKQLKRRRYTGWGRLSRKLINGIRDKQSGKTILDFLKSDGFANRNFMQLIHDDSLTFKEDIQKAQVSGQGDSLHEHIANLAGSPAIKKGILQTVKVVDELVKVMGRHKPENIVIEMARENQTTQKGQKNSRERMKRIEEGIKELGSQILKEHPVENTQLQNEKLYLYYLQNGRDMYVDQELDINRLSDYDVDHIVPQSFLKDDSIDNKVLTRSDKNRGKSDNVPSEEVVKKMKNYWRQLLNAKLITQRKFDNLTKAERGGLSELDKAGFIKRQLVETRQITKHVAQILDSRMNTKYDENDKLIREVKVITLKSKLVSDFRKDFQFYKVREINNYHHAHDAYLNAVVGTALIKKYPKLESEFVYGDYKVYDVRKMIAKSEQEIGKATAKYFFYSNIMNFFKTEITLANGEIRKRPLIETNGETGEIVWDKGRDFATVRKVLSMPQVNIVKKTEVQTGGFSKESILPKRNSDKLIARKKDWDPKKYGGFDSPTVAYSVLVVAKVEKGKSKKLKSVKELLGITIMERSSFEKNPIDFLEAKGYKEVKKDLIIKLPKYSLFELENGRKRMLASAGELQKGNELALPSKYVNFLYLASHYEKLKGSPEDNEQKQLFVEQHKHYLDEIIEQISEFSKRVILADANLDKVLSAYNKHRMNHRVEITEGILADECAALLCYFFRMPRQVFNAQKKAQSSTDGSSGSETPGTSESATPESSGSEVEFSHEYWMRHALTLAKRARDEREVPVGAVLVLNNRVIGEGWNRAIGLHDPTAHAEIMALRQGGLVMQNYRLIDATLYVTFEPCVMCAGAMIHSRIGRVVFGVRNAKTGAAGSLMDVLHYPGDKPIREQAENIIHLFTLTNLGAPAAFKYFDTTIDRKRYTSTKEVLDATLIHQSITGLYETRIDLSQLGGD

SEQ ID NO: 300 - protein, 1454 aa, synthetic construct
  REGION 1..1454: note = 124 Cas9 delta 792-872TadAins polypeptide sequence
MDKKYSIGLAIGTNSVGWAVITDEYKVPSKKFKVLGNTDRHSIKKNLIGALLFDSGETAEATRLKRTARRRYTRRKNRICYLQEIFSNEMAKVDDSFFHRLEESFLVEEDKKHERHPIFGNIVDEVAYHEKYPTIYHLRKKLVDSTDKADLRLIYLALAHMIKFRGHFLIEGDLNPDNSDVDKLFIQLVQTYNQLFEENPINASGVDAKAILSARLSKSRRLENLIAQLPGEKKNGLFGNLIALSLGLTPNFKSNFDLAEDAKLQLSKDTYDDDLDNLLAQIGDQYADLFLAAKNLSDAILLSDILRVNTEITKAPLSASMIKRYDEHHQDLTLLKALVRQQLPEKYKEIFFDQSKNGYAGYIDGGASQEEFYKFIKPILEKMDGTEELLVKLNREDLLRKQRTFDNGSIPHQIHLGELHAILRRQEDFYPFLKDNREKIEKILTFRIPYYVGPLARGNSRFAWMTRKSEETITPWNFEEVVDKGASAQSFIERMTNFDKNLPNEKVLPKHSLLYEYFTVYNELTKVKYVTEGMRKPAFLSGEQKKAIVDLLFKTNRKVTVKQLKEDYFKKIECFDSVEISGVEDRFNASLGTYHDLLKIIKDKDFLDNEENEDILEDIVLTLTLFEDREMIEERLKTYAHLFDDKVMKQLKRRRYTGWGRLSRKLINGIRDKQSGKTILDFLKSDGFANRNFMQLIHDDSLTFKEDIQKAQVSGQGDSLHEHIANLAGSPAIKKGILQTVKVVDELVKVMGRHKPENIVIEMARENQTTQKGQKNSRERMKRIEEGIKELGSEVEFSHEYWMRHALTLAKRARDEREVPVGAVLVLNNRVIGEGWNRAIGLHDPTAHAEIMALRQGGLVMQNYRLIDATLYVTFEPCVMCAGAMIHSRIGRVVFGVRNAKTGAAGSLMDVLHYPGMNHRVEITEGILADECAALLCYFFRMPRQVFNAQKKAQSSTDEEVVKKMKNYWRQLLNAKLITQRKFDNLTKAERGGLSELDKAGFIKRQLVETRQITKHVAQILDSRMNTKYDENDKLIREVKVITLKSKLVSDFRKDFQFYKVREINNYHHAHDAYLNAVVGTALIKKYPKLESEFVYGDYKVYDVRKMIAKSEQEIGKATAKYFFYSNIMNFFKTEITLANGEIRKRPLIETNGETGEIVWDKGRDFATVRKVLSMPQVNIVKKTEVQTGGFSKESILPKRNSDKLIARKKDWDPKKYGGFDSPTVAYSVLVVAKVEKGKSKKLKSVKELLGITIMERSSFEKNPIDFLEAKGYKEVKKDLIIKLPKYSLFELENGRKRMLASAGELQKGNELALPSKYVNFLYLASHYEKLKGSPEDNEQKQLFVEQHKHYLDEIIEQISEFSKRVILADANLDKVLSAYNKHRDKPIREQAENIIHLFTLTNLGAPAAFKYFDTTIDRKRYTSTKEVLDATLIHQSITGLYETRIDLSQLGGD

SEQ ID NO: 301 - protein, 1420 aa, synthetic construct
  REGION 1..1420: note = 125 Cas9 delta 792-906TadAins polypeptide sequence
MDKKYSIGLAIGTNSVGWAVITDEYKVPSKKFKVLGNTDRHSIKKNLIGALLFDSGETAEATRLKRTARRRYTRRKNRICYLQEIFSNEMAKVDDSFFHRLEESFLVEEDKKHERHPIFGNIVDEVAYHEKYPTIYHLRKKLVDSTDKADLRLIYLALAHMIKFRGHFLIEGDLNPDNSDVDKLFIQLVQTYNQLFEENPINASGVDAKAILSARLSKSRRLENLIAQLPGEKKNGLFGNLIALSLGLTPNFKSNFDLAEDAKLQLSKDTYDDDLDNLLAQIGDQYADLFLAAKNLSDAILLSDILRVNTEITKAPLSASMIKRYDEHHQDLTLLKALVRQQLPEKYKEIFFDQSKNGYAGYIDGGASQEEFYKFIKPILEKMDGTEELLVKLNREDLLRKQRTFDNGSIPHQIHLGELHAILRRQEDFYPFLKDNREKIEKILTFRIPYYVGPLARGNSRFAWMTRKSEETITPWNFEEVVDKGASAQSFIERMTNFDKNLPNEKVLPKHSLLYEYFTVYNELTKVKYVTEGMRKPAFLSGEQKKAIVDLLFKTNRKVTVKQLKEDYFKKIECFDSVEISGVEDRFNASLGTYHDLLKIIKDKDFLDNEENEDILEDIVLTLTLFEDREMIEERLKTYAHLFDDKVMKQLKRRRYTGWGRLSRKLINGIRDKQSGKTILDFLKSDGFANRNFMQLIHDDSLTFKEDIQKAQVSGQGDSLHEHIANLAGSPAIKKGILQTVKVVDELVKVMGRHKPENIVIEMARENQTTQKGQKNSRERMKRIEEGIKELGSEVEFSHEYWMRHALTLAKRARDEREVPVGAVLVLNNRVIGEGWNRAIGLHDPTAHAEIMALRQGGLVMQNYRLIDATLYVTFEPCVMCAGAMIHSRIGRVVFGVRNAKTGAAGSLMDVLHYPGMNHRVEITEGILADECAALLCYFFRMPRQVFNAQKKAQSSTDGLSELDKAGFIKRQLVETRQITKHVAQILDSRMNTKYDENDKLIREVKVITLKSKLVSDFRKDFQFYKVREINNYHHAHDAYLNAVVGTALIKKYPKLESEFVYGDYKVYDVRKMIAKSEQEIGKATAKYFFYSNIMNFFKTEITLANGEIRKRPLIETNGETGEIVWDKGRDFATVRKVLSMPQVNIVKKTEVQTGGFSKESILPKRNSDKLIARKKDWDPKKYGGFDSPTVAYSVLVVAKVEKGKSKKLKSVKELLGITIMERSSFEKNPIDFLEAKGYKEVKKDLIIKLPKYSLFELENGRKRMLASAGELQKGNELALPSKYVNFLYLASHYEKLKGSPEDNEQKQLFVEQHKHYLDEIIEQISEFSKRVILADANLDKVLSAYNKHRDKPIREQAENIIHLFTLTNLGAPAAFKYFDTTIDRKRYTSTKEVLDATLIHQSITGLYETRIDLSQLGGD

SEQ ID NO: 302 - protein, 1554 aa, synthetic construct
  REGION 1..1554: note = 126 TadA CP65ins 1003 polypeptide sequence
MDKKYSIGLAIGTNSVGWAVITDEYKVPSKKFKVLGNTDRHSIKKNLIGALLFDSGETAEATRLKRTARRRYTRRKNRICYLQEIFSNEMAKVDDSFFHRLEESFLVEEDKKHERHPIFGNIVDEVAYHEKYPTIYHLRKKLVDSTDKADLRLIYLALAHMIKFRGHFLIEGDLNPDNSDVDKLFIQLVQTYNQLFEENPINASGVDAKAILSARLSKSRRLENLIAQLPGEKKNGLFGNLIALSLGLTPNFKSNFDLAEDAKLQLSKDTYDDDLDNLLAQIGDQYADLFLAAKNLSDAILLSDILRVNTEITKAPLSASMIKRYDEHHQDLTLLKALVRQQLPEKYKEIFFDQSKNGYAGYIDGGASQEEFYKFIKPILEKMDGTEELLVKLNREDLLRKQRTFDNGSIPHQIHLGELHAILRRQEDFYPFLKDNREKIEKILTFRIPYYVGPLARGNSRFAWMTRKSEETITPWNFEEVVDKGASAQSFIERMTNFDKNLPNEKVLPKHSLLYEYFTVYNELTKVKYVTEGMRKPAFLSGEQKKAIVDLLFKTNRKVTVKQLKEDYFKKIECFDSVEISGVEDRFNASLGTYHDLLKIIKDKDFLDNEENEDILEDIVLTLTLFEDREMIEERLKTYAHLFDDKVMKQLKRRRYTGWGRLSRKLINGIRDKQSGKTILDFLKSDGFANRNFMQLIHDDSLTFKEDIQKAQVSGQGDSLHEHIANLAGSPAIKKGILQTVKVVDELVKVMGRHKPENIVIEMARENQTTQKGQKNSRERMKRIEEGIKELGSQILKEHPVENTQLQNEKLYLYYLQNGRDMYVDQELDINRLSDYDVDHIVPQSFLKDDSIDNKVLTRSDKNRGKSDNVPSEEVVKKMKNYWRQLLNAKLITQRKFDNLTKAERGGLSELDKAGFIKRQLVETRQITKHVAQILDSRMNTKYDENDKLIREVKVITLKSKLVSDFRKDFQFYKVREINNYHHAHDAYLNAVVGTALIKKYPKTAHAEIMALRQGGLVMQNYRLIDATLYVTFEPCVMCAGAMIHSRIGRVVFGVRNAKTGAAGSLMDVLHYPGMNHRVEITEGILADECAALLCYFFRMPRQVFNAQKKAQSSTDGSSGSETPGTSESATPESSGSEVEFSHEYWMRHALTLAKRARDEREVPVGAVLVLNNRVIGEGWNRAIGLHDPLESEFVYGDYKVYDVRKMIAKSEQEIGKATAKYFFYSNIMNFFKTEITLANGEIRKRPLIETNGETGEIVWDKGRDFATVRKVLSMPQVNIVKKTEVQTGGFSKESILPKRNSDKLIARKKDWDPKKYGGFDSPTVAYSVLVVAKVEKGKSKKLKSVKELLGITIMERSSFEKNPIDFLEAKGYKEVKKDLIIKLPKYSLFELENGRKRMLASAGELQKGNELALPSKYVNFLYLASHYEKLKGSPEDNEQKQLFVEQHKHYLDEIIEQISEFSKRVILADANLDKVLSAYNKHRDKPIREQAENIIHLFTLTNLGAPAAFKYFDTTIDRKRYTSTKEVLDATLIHQSITGLYETRIDLSQLGGD

SEQ ID NO: 303 - protein, 1554 aa, synthetic construct
  REGION 1..1554: note = 127 TadA CP65ins 1016 polypeptide sequence
MDKKYSIGLAIGTNSVGWAVITDEYKVPSKKFKVLGNTDRHSIKKNLIGALLFDSGETAEATRLKRTARRRYTRRKNRICYLQEIFSNEMAKVDDSFFHRLEESFLVEEDKKHERHPIFGNIVDEVAYHEKYPTIYHLRKKLVDSTDKADLRLIYLALAHMIKFRGHFLIEGDLNPDNSDVDKLFIQLVQTYNQLFEENPINASGVDAKAILSARLSKSRRLENLIAQLPGEKKNGLFGNLIALSLGLTPNFKSNFDLAEDAKLQLSKDTYDDDLDNLLAQIGDQYADLFLAAKNLSDAILLSDILRVNTEITKAPLSASMIKRYDEHHQDLTLLKALVRQQLPEKYKEIFFDQSKNGYAGYIDGGASQEEFYKFIKPILEKMDGTEELLVKLNREDLLRKQRTFDNGSIPHQIHLGELHAILRRQEDFYPFLKDNREKIEKILTFRIPYYVGPLARGNSRFAWMTRKSEETITPWNFEEVVDKGASAQSFIERMTNFDKNLPNEKVLPKHSLLYEYFTVYNELTKVKYVTEGMRKPAFLSGEQKKAIVDLLFKTNRKVTVKQLKEDYFKKIECFDSVEISGVEDRFNASLGTYHDLLKIIKDKDFLDNEENEDILEDIVLTLTLFEDREMIEERLKTYAHLFDDKVMKQLKRRRYTGWGRLSRKLINGIRDKQSGKTILDFLKSDGFANRNFMQLIHDDSLTFKEDIQKAQVSGQGDSLHEHIANLAGSPAIKKGILQTVKVVDELVKVMGRHKPENIVIEMARENQTTQKGQKNSRERMKRIEEGIKELGSQILKEHPVENTQLQNEKLYLYYLQNGRDMYVDQELDINRLSDYDVDHIVPQSFLKDDSIDNKVLTRSDKNRGKSDNVPSEEVVKKMKNYWRQLLNAKLITQRKFDNLTKAERGGLSELDKAGFIKRQLVETRQITKHVAQILDSRMNTKYDENDKLIREVKVITLKSKLVSDFRKDFQFYKVREINNYHHAHDAYLNAVVGTALIKKYPKLESEFVYGDYKVTAHAEIMALRQGGLVMQNYRLIDATLYVTFEPCVMCAGAMIHSRIGRVVFGVRNAKTGAAGSLMDVLHYPGMNHRVEITEGILADECAALLCYFFRMPRQVFNAQKKAQSSTDGSSGSETPGTSESATPESSGSEVEFSHEYWMRHALTLAKRARDEREVPVGAVLVLNNRVIGEGWNRAIGLHDPYDVRKMIAKSEQEIGKATAKYFFYSNIMNFFKTEITLANGEIRKRPLIETNGETGEIVWDKGRDFATVRKVLSMPQVNIVKKTEVQTGGFSKESILPKRNSDKLIARKKDWDPKKYGGFDSPTVAYSVLVVAKVEKGKSKKLKSVKELLGITIMERSSFEKNPIDFLEAKGYKEVKKDLIIKLPKYSLFELENGRKRMLASAGELQKGNELALPSKYVNFLYLASHYEKLKGSPEDNEQKQLFVEQHKHYLDEIIEQISEFSKRVILADANLDKVLSAYNKHRDKPIREQAENIIHLFTLTNLGAPAAFKYFDTTIDRKRYTSTKEVLDATLIHQSITGLYETRIDLSQLGGD

SEQ ID NO: 304 - protein, 1554 aa, synthetic construct
  REGION 1..1554: note = 128 TadA CP65ins 1022 polypeptide sequence
MDKKYSIGLAIGTNSVGWAVITDEYKVPSKKFKVLGNTDRHSIKKNLIGALLFDSGETAEATRLKRTARRRYTRRKNRICYLQEIFSNEMAKVDDSFFHRLEESFLVEEDKKHERHPIFGNIVDEVAYHEKYPTIYHLRKKLVDSTDKADLRLIYLALAHMIKFRGHFLIEGDLNPDNSDVDKLFIQLVQTYNQLFEENPINASGVDAKAILSARLSKSRRLENLIAQLPGEKKNGLFGNLIALSLGLTPNFKSNFDLAEDAKLQLSKDTYDDDLDNLLAQIGDQYADLFLAAKNLSDAILLSDILRVNTEITKAPLSASMIKRYDEHHQDLTLLKALVRQQLPEKYKEIFFDQSKNGYAGYIDGGASQEEFYKFIKPILEKMDGTEELLVKLNREDLLRKQRTFDNGSIPHQIHLGELHAILRRQEDFYPFLKDNREKIEKILTFRIPYYVGPLARGNSRFAWMTRKSEETITPWNFEEVVDKGASAQSFIERMTNFDKNLPNEKVLPKHSLLYEYFTVYNELTKVKYVTEGMRKPAFLSGEQKKAIVDLLFKTNRKVTVKQLKEDYFKKIECFDSVEISGVEDRFNASLGTYHDLLKIIKDKDFLDNEENEDILEDIVLTLTLFEDREMIEERLKTYAHLFDDKVMKQLKRRRYTGWGRLSRKLINGIRDKQSGKTILDFLKSDGFANRNFMQLIHDDSLTFKEDIQKAQVSGQGDSLHEHIANLAGSPAIKKGILQTVKVVDELVKVMGRHKPENIVIEMARENQTTQKGQKNSRERMKRIEEGIKELGSQILKEHPVENTQLQNEKLYLYYLQNGRDMYVDQELDINRLSDYDVDHIVPQSFLKDDSIDNKVLTRSDKNRGKSDNVPSEEVVKKMKNYWRQLLNAKLITQRKFDNLTKAERGGLSELDKAGFIKRQLVETRQITKHVAQILDSRMNTKYDENDKLIREVKVITLKSKLVSDFRKDFQFYKVREINNYHHAHDAYLNAVVGTALIKKYPKLESEFVYGDYKVYDVRKMITAHAEIMALRQGGLVMQNYRLIDATLYVTFEPCVMCAGAMIHSRIGRVVFGVRNAKTGAAGSLMDVLHYPGMNHRVEITEGILADECAALLCYFFRMPRQVFNAQKKAQSSTDGSSGSETPGTSESATPESSGSEVEFSHEYWMRHALTLAKRARDEREVPVGAVLVLNNRVIGEGWNRAIGLHDPAKSEQEIGKATAKYFFYSNIMNFFKTEITLANGEIRKRPLIETNGETGEIVWDKGRDFATVRKVLSMPQVNIVKKTEVQTGGFSKESILPKRNSDKLIARKKDWDPKKYGGFDSPTVAYSVLVVAKVEKGKSKKLKSVKELLGITIMERSSFEKNPIDFLEAKGYKEVKKDLIIKLPKYSLFELENGRKRMLASAGELQKGNELALPSKYVNFLYLASHYEKLKGSPEDNEQKQLFVEQHKHYLDEIIEQISEFSKRVILADANLDKVLSAYNKHRDKPIREQAENIIHLFTLTNLGAPAAFKYFDTTIDRKRYTSTKEVLDATLIHQSITGLYETRIDLSQLGGD

SEQ ID NO: 305 - protein, 1554 aa, synthetic construct
  REGION 1..1554: note = 129 TadA CP65ins 1029 polypeptide sequence
MDKKYSIGLAIGTNSVGWAVITDEYKVPSKKFKVLGNTDRHSIKKNLIGALLFDSGETAEATRLKRTARRRYTRRKNRICYLQEIFSNEMAKVDDSFFHRLEESFLVEEDKKHERHPIFGNIVDEVAYHEKYPTIYHLRKKLVDSTDKADLRLIYLALAHMIKFRGHFLIEGDLNPDNSDVDKLFIQLVQTYNQLFEENPINASGVDAKAILSARLSKSRRLENLIAQLPGEKKNGLFGNLIALSLGLTPNFKSNFDLAEDAKLQLSKDTYDDDLDNLLAQIGDQYADLFLAAKNLSDAILLSDILRVNTEITKAPLSASMIKRYDEHHQDLTLLKALVRQQLPEKYKEIFFDQSKNGYAGYIDGGASQEEFYKFIKPILEKMDGTEELLVKLNREDLLRKQRTFDNGSIPHQIHLGELHAILRRQEDFYPFLKDNREKIEKILTFRIPYYVGPLARGNSRFAWMTRKSEETITPWNFEEVVDKGASAQSFIERMTNFDKNLPNEKVLPKHSLLYEYFTVYNELTKVKYVTEGMRKPAFLSGEQKKAIVDLLFKTNRKVTVKQLKEDYFKKIECFDSVEISGVEDRFNASLGTYHDLLKIIKDKDFLDNEENEDILEDIVLTLTLFEDREMIEERLKTYAHLFDDKVMKQLKRRRYTGWGRLSRKLINGIRDKQSGKTILDFLKSDGFANRNFMQLIHDDSLTFKEDIQKAQVSGQGDSLHEHIANLAGSPAIKKGILQTVKVVDELVKVMGRHKPENIVIEMARENQTTQKGQKNSRERMKRIEEGIKELGSQILKEHPVENTQLQNEKLYLYYLQNGRDMYVDQELDINRLSDYDVDHIVPQSFLKDDSIDNKVLTRSDKNRGKSDNVPSEEVVKKMKNYWRQLLNAKLITQRKFDNLTKAERGGLSELDKAGFIKRQLVETRQITKHVAQILDSRMNTKYDENDKLIREVKVITLKSKLVSDFRKDFQFYKVREINNYHHAHDAYLNAVVGTALIKKYPKLESEFVYGDYKVYDVRKMIAKSEQEITAHAEIMALRQGGLVMQNYRLIDATLYVTFEPCVMCAGAMIHSRIGRVVFGVRNAKTGAAGSLMDVLHYPGMNHRVEITEGILADECAALLCYFFRMPRQVFNAQKKAQSSTDGSSGSETPGTSESATPESSGSEVEFSHEYWMRHALTLAKRARDEREVPVGAVLVLNNRVIGEGWNRAIGLHDPGKATAKYFFYSNIMNFFKTEITLANGEIRKRPLIETNGETGEIVWDKGRDFATVRKVLSMPQVNIVKKTEVQTGGFSKESILPKRNSDKLIARKKDWDPKKYGGFDSPTVAYSVLVVAKVEKGKSKKLKSVKELLGITIMERSSFEKNPIDFLEAKGYKEVKKDLIIKLPKYSLFELENGRKRMLASAGELQKGNELALPSKYVNFLYLASHYEKLKGSPEDNEQKQLFVEQHKHYLDEIIEQISEFSKRVILADANLDKVLSAYNKHRDKPIREQAENIIHLFTLTNLGAPAAFKYFDTTIDRKRYTSTKEVLDATLIHQSITGLYETRIDLSQLGGD

SEQ ID NO: 306 - protein, 1554 aa, synthetic construct
  REGION 1..1554: note = 130 TadA CP65ins 1041 polypeptide sequence
MDKKYSIGLAIGTNSVGWAVITDEYKVPSKKFKVLGNTDRHSIKKNLIGALLFDSGETAEATRLKRTARRRYTRRKNRICYLQEIFSNEMAKVDDSFFHRLEESFLVEEDKKHERHPIFGNIVDEVAYHEKYPTIYHLRKKLVDSTDKADLRLIYLALAHMIKFRGHFLIEGDLNPDNSDVDKLFIQLVQTYNQLFEENPINASGVDAKAILSARLSKSRRLENLIAQLPGEKKNGLFGNLIALSLGLTPNFKSNFDLAEDAKLQLSKDTYDDDLDNLLAQIGDQYADLFLAAKNLSDAILLSDILRVNTEITKAPLSASMIKRYDEHHQDLTLLKALVRQQLPEKYKEIFFDQSKNGYAGYIDGGASQEEFYKFIKPILEKMDGTEELLVKLNREDLLRKQRTFDNGSIPHQIHLGELHAILRRQEDFYPFLKDNREKIEKILTFRIPYYVGPLARGNSRFAWMTRKSEETITPWNFEEVVDKGASAQSFIERMTNFDKNLPNEKVLPKHSLLYEYFTVYNELTKVKYVTEGMRKPAFLSGEQKKAIVDLLFKTNRKVTVKQLKEDYFKKIECFDSVEISGVEDRFNASLGTYHDLLKIIKDKDFLDNEENEDILEDIVLTLTLFEDREMIEERLKTYAHLFDDKVMKQLKRRRYTGWGRLSRKLINGIRDKQSGKTILDFLKSDGFANRNFMQLIHDDSLTFKEDIQKAQVSGQGDSLHEHIANLAGSPAIKKGILQTVKVVDELVKVMGRHKPENIVIEMARENQTTQKGQKNSRERMKRIEEGIKELGSQILKEHPVENTQLQNEKLYLYYLQNGRDMYVDQELDINRLSDYDVDHIVPQSFLKDDSIDNKVLTRSDKNRGKSDNVPSEEVVKKMKNYWRQLLNAKLITQRKFDNLTKAERGGLSELDKAGFIKRQLVETRQITKHVAQILDSRMNTKYDENDKLIREVKVITLKSKLVSDFRKDFQFYKVREINNYHHAHDAYLNAVVGTALIKKYPKLESEFVYGDYKVYDVRKMIAKSEQEIGKATAKYFFYSTAHAEIMALRQGGLVMQNYRLIDATLYVTFEPCVMCAGAMIHSRIGRVVFGVRNAKTGAAGSLMDVLHYPGMNHRVEITEGILADECAALLCYFFRMPRQVFNAQKKAQSSTDGSSGSETPGTSESATPESSGSEVEFSHEYWMRHALTLAKRARDEREVPVGAVLVLNNRVIGEGWNRAIGLHDPNIMNFFKTEITLANGEIRKRPLIETNGETGEIVWDKGRDFATVRKVLSMPQVNIVKKTEVQTGGFSKESILPKRNSDKLIARKKDWDPKKYGGFDSPTVAYSVLVVAKVEKGKSKKLKSVKELLGITIMERSSFEKNPIDFLEAKGYKEVKKDLIIKLPKYSLFELENGRKRMLASAGELQKGNELALPSKYVNFLYLASHYEKLKGSPEDNEQKQLFVEQHKHYLDEIIEQISEFSKRVILADANLDKVLSAYNKHRDKPIREQAENIIHLFTLTNLGAPAAFKYFDTTIDRKRYTSTKEVLDATLIHQSITGLYETRIDLSQLGGD

SEQ ID NO: 307 - protein, 1554 aa, synthetic construct
  REGION 1..1554: note = 131 TadA CP65ins 1054 polypeptide sequence
MDKKYSIGLAIGTNSVGWAVITDEYKVPSKKFKVLGNTDRHSIKKNLIGALLFDSGETAEATRLKRTARRRYTRRKNRICYLQEIFSNEMAKVDDSFFHRLEESFLVEEDKKHERHPIFGNIVDEVAYHEKYPTIYHLRKKLVDSTDKADLRLIYLALAHMIKFRGHFLIEGDLNPDNSDVDKLFIQLVQTYNQLFEENPINASGVDAKAILSARLSKSRRLENLIAQLPGEKKNGLFGNLIALSLGLTPNFKSNFDLAEDAKLQLSKDTYDDDLDNLLAQIGDQYADLFLAAKNLSDAILLSDILRVNTEITKAPLSASMIKRYDEHHQDLTLLKALVRQQLPEKYKEIFFDQSKNGYAGYIDGGASQEEFYKFIKPILEKMDGTEELLVKLNREDLLRKQRTFDNGSIPHQIHLGELHAILRRQEDFYPFLKDNREKIEKILTFRIPYYVGPLARGNSRFAWMTRKSEETITPWNFEEVVDKGASAQSFIERMTNFDKNLPNEKVLPKHSLLYEYFTVYNELTKVKYVTEGMRKPAFLSGEQKKAIVDLLFKTNRKVTVKQLKEDYFKKIECFDSVEISGVEDRFNASLGTYHDLLKIIKDKDFLDNEENEDILEDIVLTLTLFEDREMIEERLKTYAHLFDDKVMKQLKRRRYTGWGRLSRKLINGIRDKQSGKTILDFLKSDGFANRNFMQLIHDDSLTFKEDIQKAQVSGQGDSLHEHIANLAGSPAIKKGILQTVKVVDELVKVMGRHKPENIVIEMARENQTTQKGQKNSRERMKRIEEGIKELGSQILKEHPVENTQLQNEKLYLYYLQNGRDMYVDQELDINRLSDYDVDHIVPQSFLKDDSIDNKVLTRSDKNRGKSDNVPSEEVVKKMKNYWRQLLNAKLITQRKFDNLTKAERGGLSELDKAGFIKRQLVETRQITKHVAQILDSRMNTKYDENDKLIREVKVITLKSKLVSDFRKDFQFYKVREINNYHHAHDAYLNAVVGTALIKKYPKLESEFVYGDYKVYDVRKMIAKSEQEIGKATAKYFFYSNIMNFFKTEITLANTAHAEIMALRQGGLVMQNYRLIDATLYVTFEPCVMCAGAMIHSRIGRVVFGVRNAKTGAAGSLMDVLHYPGMNHRVEITEGILADECAALLCYFFRMPRQVFNAQKKAQSSTDGSSGSETPGTSESATPESSGSEVEFSHEYWMRHALTLAKRARDEREVPVGAVLVLNNRVIGEGWNRAIGLHDPGEIRKRPLIETNGETGEIVWDKGRDFATVRKVLSMPQVNIVKKTEVQTGGFSKESILPKRNSDKLIARKKDWDPKKYGGFDSPTVAYSVLVVAKVEKGKSKKLKSVKELLGITIMERSSFEKNPIDFLEAKGYKEVKKDLIIKLPKYSLFELENGRKRMLASAGELQKGNELALPSKYVNFLYLASHYEKLKGSPEDNEQKQLFVEQHKHYLDEIIEQISEFSKRVILADANLDKVLSAYNKHRDKPIREQAENIIHLFTLTNLGAPAAFKYFDTTIDRKRYTSTKEVLDATLIHQSITGLYETRIDLSQLGGD

SEQ ID NO: 308 - protein, 1554 aa, synthetic construct
  REGION 1..1554: note = 132 TadA CP65ins 1246 polypeptide sequence
MDKKYSIGLAIGTNSVGWAVITDEYKVPSKKFKVLGNTDRHSIKKNLIGALLFDSGETAEATRLKRTARRRYTRRKNRICYLQEIFSNEMAKVDDSFFHRLEESFLVEEDKKHERHPIFGNIVDEVAYHEKYPTIYHLRKKLVDSTDKADLRLIYLALAHMIKFRGHFLIEGDLNPDNSDVDKLFIQLVQTYNQLFEENPINASGVDAKAILSARLSKSRRLENLIAQLPGEKKNGLFGNLIALSLGLTPNFKSNFDLAEDAKLQLSKDTYDDDLDNLLAQIGDQYADLFLAAKNLSDAILLSDILRVNTEITKAPLSASMIKRYDEHHQDLTLLKALVRQQLPEKYKEIFFDQSKNGYAGYIDGGASQEEFYKFIKPILEKMDGTEELLVKLNREDLLRKQRTFDNGSIPHQIHLGELHAILRRQEDFYPFLKDNREKIEKILTFRIPYYVGPLARGNSRFAWMTRKSEETITPWNFEEVVDKGASAQSFIERMTNFDKNLPNEKVLPKHSLLYEYFTVYNELTKVKYVTEGMRKPAFLSGEQKKAIVDLLFKTNRKVTVKQLKEDYFKKIECFDSVEISGVEDRFNASLGTYHDLLKIIKDKDFLDNEENEDILEDIVLTLTLFEDREMIEERLKTYAHLFDDKVMKQLKRRRYTGWGRLSRKLINGIRDKQSGKTILDFLKSDGFANRNFMQLIHDDSLTFKEDIQKAQVSGQGDSLHEHIANLAGSPAIKKGILQTVKVVDELVKVMGRHKPENIVIEMARENQTTQKGQKNSRERMKRIEEGIKELGSQILKEHPVENTQLQNEKLYLYYLQNGRDMYVDQELDINRLSDYDVDHIVPQSFLKDDSIDNKVLTRSDKNRGKSDNVPSEEVVKKMKNYWRQLLNAKLITQRKFDNLTKAERGGLSELDKAGFIKRQLVETRQITKHVAQILDSRMNTKYDENDKLIREVKVITLKSKLVSDFRKDFQFYKVREINNYHHAHDAYLNAVVGTALIKKYPKLESEFVYGDYKVYDVRKMIAKSEQEIGKATAKYFFYSNIMNFFKTEITLANGEIRKRPLIETNGETGEIVWDKGRDFATVRKVLSMPQVNIVKKTEVQTGGFSKESILPKRNSDKLIARKKDWDPKKYGGFDSPTVAYSVLVVAKVEKGKSKKLKSVKELLGITIMERSSFEKNPIDFLEAKGYKEVKKDLIIKLPKYSLFELENGRKRMLASAGELQKGNELALPSKYVNFLYLASHYEKLKGTAHAEIMALRQGGLVMQNYRLIDATLYVTFEPCVMCAGAMIHSRIGRVVFGVRNAKTGAAGSLMDVLHYPGMNHRVEITEGILADECAALLCYFFRMPRQVFNAQKKAQSSTDGSSGSETPGTSESATPESSGSEVEFSHEYWMRHALTLAKRARDEREVPVGAVLVLNNRVIGEGWNRAIGLHDPSPEDNEQKQLFVEQHKHYLDEIIEQISEFSKRVILADANLDKVLSAYNKHRDKPIREQAENIIHLFTLTNLGAPAAFKYFDTTIDRKRYTSTKEVLDATLIHQSITGLYETRIDLSQLGGD

SEQ ID NO: 309 - protein, 160 aa, Staphylococcus aureus
  REGION 1..160: note = MISC_FEATURE - TadA polypeptide sequence
MGSHMTNDIYFMTLAIEEAKKAAQLGEVPIGAIITKDDEVIARAHNLRETLQQPTAHAEHIAIERAAKVLGSWRLEGCTLYVTLEPCVMCAGTIVMSRIPRVVYGADDPKGGCSGSLMNLLQQSNFNHRAIVDKGVLKEACSTLLTTFFKNLRANKKSTN

SEQ ID NO: 310 - protein, 161 aa, Bacillus subtilis
  REGION 1..161: note = MISC_FEATURE - TadA polypeptide sequence
MTQDELYMKEAIKEAKKAEEKGEVPIGAVLVINGEIIARAHNLRETEQRSIAHAEMLVIDEACKALGTWRLEGATLYVTLEPCPMCAGAVVLSRVEKVVFGAFDPKGGCSGTLMNLLQEERFNHQAEVVSGVLEEECGGMLSAFFRELRKKKKAARKNLSE

SEQ ID NO: 311 - protein, 183 aa, Salmonella enterica
  REGION 1..183: note = MISC_FEATURE - TadA polypeptide sequence
  source 1..183: note = serovar Typhimurium
MPPAFITGVTSLSDVELDHEYWMRHALTLAKRAWDEREVPVGAVLVHNHRVIGEGWNRPIGRHDPTAHAEIMALRQGGLVLQNYRLLDTTLYVTLEPCVMCAGAMVHSRIGRVVFGARDAKTGAAGSLIDVLHHPGMNHRVEIIEGVLRDECATLLSDFFRMRRQEIKALKKADRAEGAGPAV

SEQ ID NO: 312 - protein, 164 aa, Shewanella putrefaciens
  REGION 1..164: note = MISC_FEATURE - TadA polypeptide sequence
MDEYWMQVAMQMAEKAEAAGEVPVGAVLVKDGQQIATGYNLSISQHDPTAHAEILCLRSAGKKLENYRLLDATLYITLEPCAMCAGAMVHSRIARVVYGARDEKTGAAGTVVNLLQHPAFNHQVEVTSGVLAEACSAQLSRFFKRRRDEKKALKLAQRAQQGIE

SEQ ID NO: 313 - protein, 173 aa, Haemophilus influenzae
  REGION 1..173: note = MISC_FEATURE - TadA polypeptide sequence
MDAAKVRSEFDEKMMRYALELADKAEALGEIPVGAVLVDDARNIIGEGWNLSIVQSDPTAHAEIIALRNGAKNIQNYRLLNSTLYVTLEPCTMCAGAILHSRIKRLVFGASDYKTGAIGSRFHFFDDYKMNHTLEITSGVLAEECSQKLSTFFQKRREEKKIEKALLKSLSDK

SEQ ID NO: 314 - protein, 161 aa, Caulobacter crescentus
  REGION 1..161: note = MISC_FEATURE - TadA polypeptide sequence
MRTDESEDQDHRMMRLALDAARAAAEAGETPVGAVILDPSTGEVIATAGNGPIAAHDPTAHAEIAAMRAAAAKLGNYRLTDLTLVVTLEPCAMCAGAISHARIGRVVFGADDPKGGAVVHGPKFFAQPTCHWRPEVTGGVLADESADLLRGFFRARRKAKI

SEQ ID NO: 315 - protein, 179 aa, Geobacter sulfurreducens
  REGION 1..179: note = MISC_FEATURE - TadA polypeptide sequence
MSSLKKTPIRDDAYWMGKAIREAAKAAARDEVPIGAVIVRDGAVIGRGHNLREGSNDPSAHAEMIAIRQAARRSANWRLTGATLYVTLEPCLMCMGAIILARLERVVFGCYDPKGGAAGSLYDLSADPRLNHQVRLSPGVCQEECGTMLSDFFRDLRRRKKAKATPALFIDERKVPPEP

SEQ ID NO: 316 - protein, 167 aa, synthetic construct
  REGION 1..167: note = TadA*8 polypeptide sequence
MSEVEFSHEYWMRHALTLAKRARDEREVPVGAVLVLNNRVIGEGWNRAIGLHDPTAHAEIMALRQGGLVMQNYRLIDATLYVTFEPCVMCAGAMIHSRIGRVVFGVRNAKTGAAGSLMDVLHYPGMNHRVEITEGILADECAALLCTFFRMPRQVFNAQKKAQSSTD

SEQ ID NO: 317 - RNA, 80 nt, synthetic construct
  misc_feature 1..80: note = gRNA scaffold polynucleotide sequence
  source 1..80: mol_type = other RNA
gttttagagctagaaatagcaagttaaaataaggctagtccgttatcaacttgaaaaagtggcaccgagtcggtgctttt

SEQ ID NO: 318 - RNA, 125 nt, synthetic construct
  misc_feature 1..125: note = gRNA scaffold polynucleotide sequence
  source 1..125: mol_type = other RNA
gtttttgtactctcaagatttaagtaactgtacaacgaaacttacacagttacttaaatcttgcagaagctacaaagataaggcttcatgccgaaatcaacaccctgtcattttatggcagggtg

SEQ ID NO: 319 - RNA, 76 nt, Streptococcus pyogenes
  misc_feature 1..76: note = S. pyogenes gRNA scaffold oligonucleotide sequence
  source 1..76: mol_type = other RNA
gttttagagctagaaatagcaagttaaaataaggctagtccgttatcaacttgaaaaagtggcaccgagtcggtgc

SEQ ID NO: 320 - RNA, 84 nt, Staphylococcus aureus
  misc_feature 1..84: note = S. aureus gRNA scaffold oligonucleotide sequence
  source 1..84: mol_type = other RNA
gttttagtactctgtaatgaaaattacagaatctactaaaacaaggcaaaatgccgtgtttatctcgtcaacttgttggcgaga

SEQ ID NO: 321 - RNA, 97 nt, Bacillus hisashii
  misc_feature 1..97: note = BhCas12b gRNA scaffold oligonucleotide sequence
  source 1..97: mol_type = other RNA
gttctgtcttttggtcaggacaaccgtctagctataagtgctgcagggtgtgagaaactcctattgctggacgatgtctcttacgaggcattagcac

SEQ ID NO: 322 - RNA, 88 nt, Bacillus sp.
  misc_feature 1..88: note = BvCas12b gRNA scaffold oligonucleotide sequence
  source 1..88: mol_type = other RNA
gacctatagggtcaatgaatctgtgcgtgtgccataagtaattaaaaattacccaccacaggagcacctgaaaacaggtgcttggcac

SEQ ID NO: 323 - RNA, 80 nt, synthetic construct
  misc_feature 1..80: note = gRNA scaffold nucleotide sequence; oligonucleotide sequence
  modified_base 78..80: mod_base = um
  misc_feature 78..80: note = In embodiments, a nucleotide(s) is linked to the preceding 5' nucleotide by a 3' phosphorothioate internucleotide linkage
  source 1..80: mol_type = other RNA
gttttagagctagaaatagcaagttaaaataaggctagtccgttatcaacttgaaaaagtgggaccgagtcggtgctttt

SEQ ID NO: 324 - RNA, 80 nt, synthetic construct; identical to SEQ ID NO: 317
  misc_feature 1..80: note = gRNA scaffold nucleotide sequence
  misc_feature 78..80: note = In embodiments, a nucleotide(s) is linked to the preceding 5' nucleotide by a 3' phosphorothioate internucleotide linkage
  modified_base 78..80: mod_base = um
  source 1..80: mol_type = other RNA

SEQ ID NO: 325 - RNA, 117 nt, Bacillus hisashii
  misc_feature 1..117: note = BhCas12b gRNA scaffold + guide sequence; oligonucleotide sequence
  misc_feature 1..97: note = BhCas12b sgRNA scaffold
  source 1..117: mol_type = other RNA
gttctgtcttttggtcaggacaaccgtctagctataagtgctgcagggtgtgagaaactcctattgctggacgatgtctcttacgaggcattagcacnnnnnnnnnnnnnnnnnnnn

SEQ ID NO: 326 - RNA, 108 nt, Bacillus sp.
  misc_feature 1..108: note = BvCas12b gRNA scaffold + guide sequence; oligonucleotide sequence
  misc_feature 1..88: note = BvCas12b gRNA scaffold
  source 1..108: mol_type = other RNA
gacctatagggtcaatgaatctgtgcgtgtgccataagtaattaaaaattacccaccacaggagcacctgaaaacaggtgcttggcacnnnnnnnnnnnnnnnnnnnn

SEQ ID NO: 327 - RNA, 119 nt, Alicyclobacillus acidiphilus
  misc_feature 1..119: note = AaCas12b gRNA scaffold + guide sequence; oligonucleotide sequence
  misc_feature 1..99: note = AaCas12b gRNA scaffold
  source 1..119: mol_type = other RNA
gtctaaaggacagaatttttcaacgggtgtgccaatggccactttccaggtggcaaagcccgttgaacttctcaaaaagaacgatctgagaagtggcacnnnnnnnnnnnnnnnnnnnn

SEQ ID NO: 328 - protein, 29 aa, synthetic construct
  REGION 1..29: note = synthetic polypeptide sequence
PKKKRKVEGADKRTADGSEFESPKKKRKV

SEQ ID NO: 329 - protein, 23 aa, synthetic construct
  REGION 1..23: note = synthetic peptide sequence
RKSGKIAAIVVKRPRKPKKKRKV

SEQ ID NO: 330 - protein, 8 aa, synthetic construct
  REGION 1..8: note = synthetic peptide sequence
SGGSSGGS

SEQ ID NO: 331 - protein, 1609 aa, synthetic construct
  REGION 1..1609: note = pNMG-B335ABE8.1_Y147T_CP5_NGC PAM_monomer polypeptide sequence
MSEVEFSHEYWMRHALTLAKRARDEREVPVGAVLVLNNRVIGEGWNRAIGLHDPTAHAEIMALRQGGLVMQNYRLIDATLYVTFEPCVMCAGAMIHSRIGRVVFGVRNAKTGAAGSLMDVLHYPGMNHRVEITEGILADECAALLCTFFRMPRQVFNAQKKAQSSTDSGGSSGGSSGSETPGTSESATPESSGGSSGGSEIGKATAKYFFYSNIMNFFKTEITLANGEIRKRPLIETNGETGEIVWDKGRDFATVRKVLSMPQVNIVKKTEVQTGGFSKESILPKRNSDKLIARKKDWDPKKYGGFMQPTVAYSVLVVAKVEKGKSKKLKSVKELLGITIMERSSFEKNPIDFLEAKGYKEVKKDLIIKLPKYSLFELENGRKRMLASAKFLQKGNELALPSKYVNFLYLASHYEKLKGSPEDNEQKQLFVEQHKHYLDEIIEQISEFSKRVILADANLDKVLSAYNKHRDKPIREQAENIIHLFTLTNLGAPRAFKYFDTTIARKEYRSTKEVLDATLIHQSITGLYETRIDLSQLGGDGGSGGSGGSGGSGGSGGSGGMDKKYSIGLAIGTNSVGWAVITDEYKVPSKKFKVLGNTDRHSIKKNLIGALLFDSGETAEATRLKRTARRRYTRRKNRICYLQEIFSNEMAKVDDSFFHRLEESFLVEEDKKHERHPIFGNIVDEVAYHEKYPTIYHLRKKLVDSTDKADLRLIYLALAHMIKFRGHFLIEGDLNPDNSDVDKLFIQLVQTYNQLFEENPINASGVDAKAILSARLSKSRRLENLIAQLPGEKKNGLFGNLIALSLGLTPNFKSNFDLAEDAKLQLSKDTYDDDLDNLLAQIGDQYADLFLAAKNLSDAILLSDILRVNTEITKAPLSASMIKRYDEHHQDLTLLKALVRQQLPEKYKEIFFDQSKNGYAGYIDGGASQEEFYKFIKPILEKMDGTEELLVKLNREDLLRKQRTFDNGSIPHQIHLGELHAILRRQEDFYPFLKDNREKIEKILTFRIPYYVGPLARGNSRFAWMTRKSEETITPWNFEEVVDKGASAQSFIERMTNFDKNLPNEKVLPKHSLLYEYFTVYNELTKVKYVTEGMRKPAFLSGEQKKAIVDLLFKTNRKVTVKQLKEDYFKKIECFDSVEISGVEDRFNASLGTYHDLLKIIKDKDFLDNEENEDILEDIVLTLTLFEDREMIEERLKTYAHLFDDKVMKQLKRRRYTGWGRLSRKLINGIRDKQSGKTILDFLKSDGFANRNFMQLIHDDSLTFKEDIQKAQVSGQGDSLHEHIANLAGSPAIKKGILQTVKVVDELVKVMGRHKPENIVIEMARENQTTQKGQKNSRERMKRIEEGIKELGSQILKEHPVENTQLQNEKLYLYYLQNGRDMYVDQELDINRLSDYDVDHIVPQSFLKDDSIDNKVLTRSDKNRGKSDNVPSEEVVKKMKNYWRQLLNAKLITQRKFDNLTKAERGGLSELDKAGFIKRQLVETRQITKHVAQILDSRMNTKYDENDKLIREVKVITLKSKLVSDFRKDFQFYKVREINNYHHAHDAYLNAVVGTALIKKYPKLESEFVYGDYKVYDVRKMIAKSEQEGADKRTADGSEFESPKKKRKV

SEQ ID NO: 332 - protein, 1807 aa, synthetic construct
  REGION 1..1807: note = pNMG-357_ABE8.14 with NGC PAMCP5 polypeptide sequence
  REGION 1..174: note = MISC_FEATURE - Adenosine deaminase sequence
  REGION 175..198: note = MISC_FEATURE - Linker sequence
  REGION 199..365: note = MISC_FEATURE - Adenosine deaminase sequence
  REGION 366..397: note = MISC_FEATURE - Linker sequence
  REGION 398..738: note = MISC_FEATURE - Sequence derived from Cas9
  REGION 739..759: note = MISC_FEATURE - Linker sequence
  REGION 760..1785: note = MISC_FEATURE - Sequence derived from Cas9
  REGION 1786..1807: note = MISC_FEATURE - Bipartite nuclear localization sequence
MSEVEFSHEYWMRHALTLAKRAWDEREVPVGAVLVHNNRVIGEGWNRPIGRHDPTAHAEIMALRQGGLVMQNYRLIDATLYVTLEPCVMCAGAMIHSRIGRVVFGARDAKTGAAGSLMDVLHHPGMNHRVEITEGILADECAALLSDFFRMRRQEIKAQKKAQSSTDGGSSGGSSGSETPGTSESATPESSGGSSGGSMSEVEFSHEYWMRHALTLAKRARDEREVPVGAVLVLNNRVIGEGWNRAIGLHDPTAHAEIMALRQGGLVMQNYRLIDATLYVTFEPCVMCAGAMIHSRIGRVVFGVRNAKTGAAGSLMDVLHYPGMNHRVEITEGILADECAALLCTFFRMPRQVFNAQKKAQSSTDSGGSSGGSSGSETPGTSESATPESSGGSSGGSEIGKATAKYFFYSNIMNFFKTEITLANGEIRKRPLIETNGETGEIVWDKGRDFATVRKVLSMPQVNIVKKTEVQTGGFSKESILPKRNSDKLIARKKDWDPKKYGGFMQPTVAYSVLVVAKVEKGKSKKLKSVKELLGITIMERSSFEKNPIDFLEAKGYKEVKKDLIIKLPKYSLFELENGRKRMLASAKFLQKGNELALPSKYVNFLYLASHYEKLKGSPEDNEQKQLFVEQHKHYLDEIIEQISEFSKRVILADANLDKVLSAYNKHRDKPIREQAENIIHLFTLTNLGAPRAFKYFDTTIARKEYRSTKEVLDATLIHQSITGLYETRIDLSQLGGDGGSGGSGGSGGSGGSGGSGGMDKKYSIGLAIGTNSVGWAVITDEYKVPSKKFKVLGNTDRHSIKKNLIGALLFDSGETAEATRLKRTARRRYTRRKNRICYLQEIFSNEMAKVDDSFFHRLEESFLVEEDKKHERHPIFGNIVDEVAYHEKYPTIYHLRKKLVDSTDKADLRLIYLALAHMIKFRGHFLIEGDLNPDNSDVDKLFIQLVQTYNQLFEENPINASGVDAKAILSARLSKSRRLENLIAQLPGEKKNGLFGNLIALSLGLTPNFKSNFDLAEDAKLQLSKDTYDDDLDNLLAQIGDQYADLFLAAKNLSDAILLSDILRVNTEITKAPLSASMIKRYDEHHQDLTLLKALVRQQLPEKYKEIFFDQSKNGYAGYIDGGASQEEFYKFIKPILEKMDGTEELLVKLNREDLLRKQRTFDNGSIPHQIHLGELHAILRRQEDFYPFLKDNREKIEKILTFRIPYYVGPLARGNSRFAWMTRKSEETITPWNFEEVVDKGASAQSFIERMTNFDKNLPNEKVLPKHSLLYEYFTVYNELTKVKYVTEGMRKPAFLSGEQKKAIVDLLFKTNRKVTVKQLKEDYFKKIECFDSVEISGVEDRFNASLGTYHDLLKIIKDKDFLDNEENEDILEDIVLTLTLFEDREMIEERLKTYAHLFDDKVMKQLKRRRYTGWGRLSRKLINGIRDKQSGKTILDFLKSDGFANRNFMQLIHDDSLTFKEDIQKAQVSGQGDSLHEHIANLAGSPAIKKGILQTVKVVDELVKVMGRHKPENIVIEMARENQTTQKGQKNSRERMKRIEEGIKELGSQILKEHPVENTQLQNEKLYLYYLQNGRDMYVDQELDINRLSDYDVDHIVPQSFLKDDSIDNKVLTRSDKNRGKSDNVPSEEVVKKMKNYWRQLLNAKLITQRKFDNLTKAERGGLSELDKAGFIKRQLVETRQITKHVAQILDSRMNTKYDENDKLIREVKVITLKSKLVSDFRKDFQFYKVREINNYHHAHDAYLNAVVGTALIKKYPKLESEFVYGDYKVYDVRKMIAKSEQEGADKRTADGSEFESPKKKRKV

SEQ ID NO: 333 - protein, 1588 aa, synthetic construct
  REGION 1..1588: note = ABE8.8-m polypeptide sequence
  REGION 1..167: note = MISC_FEATURE - Adenosine deaminase sequence
  REGION 168..199: note = MISC_FEATURE - Linker sequence
  REGION 200..1566: note = MISC_FEATURE - Sequence derived from Cas9
  REGION 1567..1588: note = MISC_FEATURE - Bipartite nuclear localization sequence
MSEVEFSHEYWMRHALTLAKRARDEREVPVGAVLVLNNRVIGEGWNRAIGLHDPTAHAEIMALRQGGLVMQNYRLIDATLYVTFEPCVMCAGAMIHSRIGRVVFGVRNAKTGAAGSLMDVLHHPGMNHRVEITEGILADECAALLCRFFRMPRRVFNAQKKAQSSTDSGGSSGGSSGSETPGTSESATPESSGGSSGGSDKKYSIGLAIGTNSVGWAVITDEYKVPSKKFKVLGNTDRHSIKKNLIGALLFDSGETAEATRLKRTARRRYTRRKNRICYLQEIFSNEMAKVDDSFFHRLEESFLVEEDKKHERHPIFGNIVDEVAYHEKYPTIYHLRKKLVDSTDKADLRLIYLALAHMIKFRGHFLIEGDLNPDNSDVDKLFIQLVQTYNQLFEENPINASGVDAKAILSARLSKSRRLENLIAQLPGEKKNGLFGNLIALSLGLTPNFKSNFDLAEDAKLQLSKDTYDDDLDNLLAQIGDQYADLFLAAKNLSDAILLSDILRVNTEITKAPLSASMIKRYDEHHQDLTLLKALVRQQLPEKYKEIFFDQSKNGYAGYIDGGASQEEFYKFIKPILEKMDGTEELLVKLNREDLLRKQRTFDNGSIPHQIHLGELHAILRRQEDFYPFLKDNREKIEKILTFRIPYYVGPLARGNSRFAWMTRKSEETITPWNFEEVVDKGASAQSFIERMTNFDKNLPNEKVLPKHSLLYEYFTVYNELTKVKYVTEGMRKPAFLSGEQKKAIVDLLFKTNRKVTVKQLKEDYFKKIECFDSVEISGVEDRFNASLGTYHDLLKIIKDKDFLDNEENEDILEDIVLTLTLFEDREMIEERLKTYAHLFDDKVMKQLKRRRYTGWGRLSRKLINGIRDKQSGKTILDFLKSDGFANRNFMQLIHDDSLTFKEDIQKAQVSGQGDSLHEHIANLAGSPAIKKGILQTVKVVDELVKVMGRHKPENIVIEMARENQTTQKGQKNSRERMKRIEEGIKELGSQILKEHPVENTQLQNEKLYLYYLQNGRDMYVDQELDINRLSDYDVDHIVPQSFLKDDSIDNKVLTRSDKNRGKSDNVPSEEVVKKMKNYWRQLLNAKLITQRKFDNLTKAERGGLSELDKAGFIKRQLVETRQITKHVAQILDSRMNTKYDENDKLIREVKVITLKSKLVSDFRKDFQFYKVREINNYHHAHDAYLNAVVGTALIKKYPKLESEFVYGDYKVYDVRKMIAKSEQEIGKATAKYFFYSNIMNFFKTEITLANGEIRKRPLIETNGETGEIVWDKGRDFATVRKVLSMPQVNIVKKTEVQTGGFSKESILPKRNSDKLIARKKDWDPKKYGGFDSPTVAYSVLVVAKVEKGKSKKLKSVKELLGITIMERSSFEKNPIDFLEAKGYKEVKKDLIIKLPKYSLFELENGRKRMLASAGELQKGNELALPSKYVNFLYLASHYEKLKGSPEDNEQKQLFVEQHKHYLDEIIEQISEFSKRVILADANLDKVLSAYNKHRDKPIREQAENIIHLFTLTNLGAPAAFKYFDTTIDRKRYTSTKEVLDATLIHQSITGLYETRIDLSQLGGDEGADKRTADGSEFESPKKKRKV

SEQ ID NO: 334 - protein, 1786 aa, synthetic construct
  REGION 1..1786: note = ABE8.8-d polypeptide sequence
  REGION 1..167: note = MISC_FEATURE - Adenosine deaminase sequence
  REGION 168..199: note = MISC_FEATURE - Linker sequence
  REGION 200..365: note = MISC_FEATURE - Adenosine deaminase sequence
  REGION 366..397: note = MISC_FEATURE - Linker sequence
  REGION 398..1764: note = MISC_FEATURE - Sequence derived from Cas9
  REGION 1765..1786: note = MISC_FEATURE - Bipartite nuclear localization sequence
MSEVEFSHEYWMRHALTLAKRAWDEREVPVGAVLVHNNRVIGEGWNRPIGRHDPTAHAEIMALRQGGLVMQNYRLIDATLYVTLEPCVMCAGAMIHSRIGRVVFGARDAKTGAAGSLMDVLHHPGMNHRVEITEGILADECAALLSDFFRMRRQEIKAQKKAQSSTDSGGSSGGSSGSETPGTSESATPESSGGSSGGSSEVEFSHEYWMRHALTLAKRARDEREVPVGAVLVLNNRVIGEGWNRAIGLHDPTAHAEIMALRQGGLVMQNYRLIDATLYVTFEPCVMCAGAMIHSRIGRVVFGVRNAKTGAAGSLMDVLHHPGMNHRVEITEGILADECAALLCRFFRMPRRVFNAQKKAQSSTDSGGSSGGSSGSETPGTSESATPESSGGSSGGSDKKYSIGLAIGTNSVGWAVITDEYKVPSKKFKVLGNTDRHSIKKNLIGALLFDSGETAEATRLKRTARRRYTRRKNRICYLQEIFSNEMAKVDDSFFHRLEESFLVEEDKKHERHPIFGNIVDEVAYHEKYPTIYHLRKKLVDSTDKADLRLIYLALAHMIKFRGHFLIEGDLNPDNSDVDKLFIQLVQTYNQLFEENPINASGVDAKAILSARLSKSRRLENLIAQLPGEKKNGLFGNLIALSLGLTPNFKSNFDLAEDAKLQLSKDTYDDDLDNLLAQIGDQYADLFLAAKNLSDAILLSDILRVNTEITKAPLSASMIKRYDEHHQDLTLLKALVRQQLPEKYKEIFFDQSKNGYAGYIDGGASQEEFYKFIKPILEKMDGTEELLVKLNREDLLRKQRTFDNGSIPHQIHLGELHAILRRQEDFYPFLKDNREKIEKILTFRIPYYVGPLARGNSRFAWMTRKSEETITPWNFEEVVDKGASAQSFIERMTNFDKNLPNEKVLPKHSLLYEYFTVYNELTKVKYVTEGMRKPAFLSGEQKKAIVDLLFKTNRKVTVKQLKEDYFKKIECFDSVEISGVEDRFNASLGTYHDLLKIIKDKDFLDNEENEDILEDIVLTLTLFEDREMIEERLKTYAHLFDDKVMKQLKRRRYTGWGRLSRKLINGIRDKQSGKTILDFLKSDGFANRNFMQLIHDDSLTFKEDIQKAQVSGQGDSLHEHIANLAGSPAIKKGILQTVKVVDELVKVMGRHKPENIVIEMARENQTTQKGQKNSRERMKRIEEGIKELGSQILKEHPVENTQLQNEKLYLYYLQNGRDMYVDQELDINRLSDYDVDHIVPQSFLKDDSIDNKVLTRSDKNRGKSDNVPSEEVVKKMKNYWRQLLNAKLITQRKFDNLTKAERGGLSELDKAGFIKRQLVETRQITKHVAQILDSRMNTKYDENDKLIREVKVITLKSKLVSDFRKDFQFYKVREINNYHHAHDAYLNAVVGTALIKKYPKLESEFVYGDYKVYDVRKMIAKSEQEIGKATAKYFFYSNIMNFFKTEITLANGEIRKRPLIETNGETGEIVWDKGRDFATVRKVLSMPQVNIVKKTEVQTGGFSKESILPKRNSDKLIARKKDWDPKKYGGFDSPTVAYSVLVVAKVEKGKSKKLKSVKELLGITIMERSSFEKNPIDFLEAKGYKEVKKDLIIKLPKYSLFELENGRKRMLASAGELQKGNELALPSKYVNFLYLASHYEKLKGSPEDNEQKQLFVEQHKHYLDEIIEQISEFSKRVILADANLDKVLSAYNKHRDKPIREQAENIIHLFTLTNLGAPAAFKYFDTTIDRKRYTSTKEVLDATLIHQSITGLYETRIDLSQLGGDEGADKRTADGSEFESPKKKRKV

SEQ ID NO: 335 - protein, 1588 aa, synthetic construct
  REGION 1..1588: note = ABE8.13-m polypeptide sequence
  REGION 1..167: note = MISC_FEATURE - Adenosine deaminase sequence
  REGION 168..199: note = MISC_FEATURE - Linker sequence
  REGION 200..1566: note = MISC_FEATURE - Sequence derived from Cas9
  REGION 1567..1588: note = MISC_FEATURE - Bipartite nuclear localization sequence
MSEVEFSHEYWMRHALTLAKRARDEREVPVGAVLVLNNRVIGEGWNRAIGLHDPTAHAEIMALRQGGLVMQNYRLYDATLYVTFEPCVMCAGAMIHSRIGRVVFGVRNAKTGAAGSLMDVLHHPGMNHRVEITEGILADECAALLCRFFRMPRRVFNAQKKAQSSTDSGGSSGGSSGSETPGTSESATPESSGGSSGGSDKKYSIGLAIGTNSVGWAVITDEYKVPSKKFKVLGNTDRHSIKKNLIGALLFDSGETAEATRLKRTARRRYTRRKNRICYLQEIFSNEMAKVDDSFFHRLEESFLVEEDKKHERHPIFGNIVDEVAYHEKYPTIYHLRKKLVDSTDKADLRLIYLALAHMIKFRGHFLIEGDLNPDNSDVDKLFIQLVQTYNQLFEENPINASGVDAKAILSARLSKSRRLENLIAQLPGEKKNGLFGNLIALSLGLTPNFKSNFDLAEDAKLQLSKDTYDDDLDNLLAQIGDQYADLFLAAKNLSDAILLSDILRVNTEITKAPLSASMIKRYDEHHQDLTLLKALVRQQLPEKYKEIFFDQSKNGYAGYIDGGASQEEFYKFIKPILEKMDGTEELLVKLNREDLLRKQRTFDNGSIPHQIHLGELHAILRRQEDFYPFLKDNREKIEKILTFRIPYYVGPLARGNSRFAWMTRKSEETITPWNFEEVVDKGASAQSFIERMTNFDKNLPNEKVLPKHSLLYEYFTVYNELTKVKYVTEGMRKPAFLSGEQKKAIVDLLFKTNRKVTVKQLKEDYFKKIECFDSVEISGVEDRFNASLGTYHDLLKIIKDKDFLDNEENEDILEDIVLTLTLFEDREMIEERLKTYAHLFDDKVMKQLKRRRYTGWGRLSRKLINGIRDKQSGKTILDFLKSDGFANRNFMQLIHDDSLTFKEDIQKAQVSGQGDSLHEHIANLAGSPAIKKGILQTVKVVDELVKVMGRHKPENIVIEMARENQTTQKGQKNSRERMKRIEEGIKELGSQILKEHPVENTQLQNEKLYLYYLQNGRDMYVDQELDINRLSDYDVDHIVPQSFLKDDSIDNKVLTRSDKNRGKSDNVPSEEVVKKMKNYWRQLLNAKLITQRKFDNLTKAERGGLSELDKAGFIKRQLVETRQITKHVAQILDSRMNTKYDENDKLIREVKVITLKSKLVSDFRKDFQFYKVREINNYHHAHDAYLNAVVGTALIKKYPKLESEFVYGDYKVYDVRKMIAKSEQEIGKATAKYFFYSNIMNFFKTEITLANGEIRKRPLIETNGETGEIVWDKGRDFATVRKVLSMPQVNIVKKTEVQTGGFSKESILPKRNSDKLIARKKDWDPKKYGGFDSPTVAYSVLVVAKVEKGKSKKLKSVKELLGITIMERSSFEKNPIDFLEAKGYKEVKKDLIIKLPKYSLFELENGRKRMLASAGELQKGNELALPSKYVNFLYLASHYEKLKGSPEDNEQKQLFVEQHKHYLDEIIEQISEFSKRVILADANLDKVLSAYNKHRDKPIREQAENIIHLFTLTNLGAPAAFKYFDTTIDRKRYTSTKEVLDATLIHQSITGLYETRIDLSQLGGDEGADKRTADGSEFESPKKKRKV

SEQ ID NO: 336 - protein, 1786 aa, synthetic construct
  REGION 1..1786: note = ABE8.13-d polypeptide sequence
  REGION 1..167: note = MISC_FEATURE - Adenosine deaminase sequence
  REGION 168..199: note = MISC_FEATURE - Linker sequence
  REGION 200..365: note = MISC_FEATURE - Adenosine deaminase sequence
  REGION 366..397: note = MISC_FEATURE - Linker sequence
  REGION 398..1764: note = MISC_FEATURE - Sequence derived from Cas9
  REGION 1765..1786: note = MISC_FEATURE - Bipartite nuclear localization sequence
MSEVEFSHEYWMRHALTLAKRAWDEREVPVGAVLVHNNRVIGEGWNRPIGRHDPTAHAEIMALRQGGLVMQNYRLIDATLYVTLEPCVMCAGAMIHSRIGRVVFGARDAKTGAAGSLMDVLHHPGMNHRVEITEGILADECAALLSDFFRMRRQEIKAQKKAQSSTDSGGSSGGSSGSETPGTSESATPESSGGSSGGSSEVEFSHEYWMRHALTLAKRARDEREVPVGAVLVLNNRVIGEGWNRAIGLHDPTAHAEIMALRQGGLVMQNYRLYDATLYVTFEPCVMCAGAMIHSRIGRVVFGVRNAKTGAAGSLMDVLHHPGMNHRVEITEGILADECAALLCRFFRMPRRVFNAQKKAQSSTDSGGSSGGSSGSETPGTSESATPESSGGSSGGSDKKYSIGLAIGTNSVGWAVITDEYKVPSKKFKVLGNTDRHSIKKNLIGALLFDSGETAEATRLKRTARRRYTRRKNRICYLQEIFSNEMAKVDDSFFHRLEESFLVEEDKKHERHPIFGNIVDEVAYHEKYPTIYHLRKKLVDSTDKADLRLIYLALAHMIKFRGHFLIEGDLNPDNSDVDKLFIQLVQTYNQLFEENPINASGVDAKAILSARLSKSRRLENLIAQLPGEKKNGLFGNLIALSLGLTPNFKSNFDLAEDAKLQLSKDTYDDDLDNLLAQIGDQYADLFLAAKNLSDAILLSDILRVNTEITKAPLSASMIKRYDEHHQDLTLLKALVRQQLPEKYKEIFFDQSKNGYAGYIDGGASQEEFYKFIKPILEKMDGTEELLVKLNREDLLRKQRTFDNGSIPHQIHLGELHAILRRQEDFYPFLKDNREKIEKILTFRIPYYVGPLARGNSRFAWMTRKSEETITPWNFEEVVDKGASAQSFIERMTNFDKNLPNEKVLPKHSLLYEYFTVYNELTKVKYVTEGMRKPAFLSGEQKKAIVDLLFKTNRKVTVKQLKEDYFKKIECFDSVEISGVEDRFNASLGTYHDLLKIIKDKDFLDNEENEDILEDIVLTLTLFEDREMIEERLKTYAHLFDDKVMKQLKRRRYTGWGRLSRKLINGIRDKQSGKTILDFLKSDGFANRNFMQLIHDDSLTFKEDIQKAQVSGQGDSLHEHIANLAGSPAIKKGILQTVKVVDELVKVMGRHKPENIVIEMARENQTTQKGQKNSRERMKRIEEGIKELGSQILKEHPVENTQLQNEKLYLYYLQNGRDMYVDQELDINRLSDYDVDHIVPQSFLKDDSIDNKVLTRSDKNRGKSDNVPSEEVVKKMKNYWRQLLNAKLITQRKFDNLTKAERGGLSELDKAGFIKRQLVETRQITKHVAQILDSRMNTKYDENDKLIREVKVITLKSKLVSDFRKDFQFYKVREINNYHHAHDAYLNAVVGTALIKKYPKLESEFVYGDYKVYDVRKMIAKSEQEIGKATAKYFFYSNIMNFFKTEITLANGEIRKRPLIETNGETGEIVWDKGRDFATVRKVLSMPQVNIVKKTEVQTGGFSKESILPKRNSDKLIARKKDWDPKKYGGFDSPTVAYSVLVVAKVEKGKSKKLKSVKELLGITIMERSSFEKNPIDFLEAKGYKEVKKDLIIKLPKYSLFELENGRKRMLASAGELQKGNELALPSKYVNFLYLASHYEKLKGSPEDNEQKQLFVEQHKHYLDEIIEQISEFSKRVILADANLDKVLSAYNKHRDKPIREQAENIIHLFTLTNLGAPAAFKYFDTTIDRKRYTSTKEVLDATLIHQSITGLYETRIDLSQLGGDEGADKRTADGSEFESPKKKRKV

SEQ ID NO: 337 - protein, 1588 aa, synthetic construct
  REGION 1..1588: note = ABE8.17-m polypeptide sequence
  REGION 1..167: note = MISC_FEATURE - Adenosine deaminase sequence
  REGION 168..199: note = MISC_FEATURE - Linker sequence
  REGION 200..1566: note = MISC_FEATURE - Sequence derived from Cas9
  REGION 1567..1588: note = MISC_FEATURE - Bipartite nuclear localization sequence
MSEVEFSHEYWMRHALTLAKRARDEREVPVGAVLVLNNRVIGEGWNRAIGLHDPTAHAEIMALRQGGLVMQNYRLIDATLYSTFEPCVMCAGAMIHSRIGRVVFGVRNAKTGAAGSLMDVLHYPGMNHRVEITEGILADECAALLCYFFRMPRRVFNAQKKAQSSTDSGGSSGGSSGSETPGTSESATPESSGGSSGGSDKKYSIGLAIGTNSVGWAVITDEYKVPSKKFKVLGNTDRHSIKKNLIGALLFDSGETAEATRLKRTARRRYTRRKNRICYLQEIFSNEMAKVDDSFFHRLEESFLVEEDKKHERHPIFGNIVDEVAYHEKYPTIYHLRKKLVDSTDKADLRLIYLALAHMIKFRGHFLIEGDLNPDNSDVDKLFIQLVQTYNQLFEENPINASGVDAKAILSARLSKSRRLENLIAQLPGEKKNGLFGNLIALSLGLTPNFKSNFDLAEDAKLQLSKDTYDDDLDNLLAQIGDQYADLFLAAKNLSDAILLSDILRVNTEITKAPLSASMIKRYDEHHQDLTLLKALVRQQLPEKYKEIFFDQSKNGYAGYIDGGASQEEFYKFIKPILEKMDGTEELLVKLNREDLLRKQRTFDNGSIPHQIHLGELHAILRRQEDFYPFLKDNREKIEKILTFRIPYYVGPLARGNSRFAWMTRKSEETITPWNFEEVVDKGASAQSFIERMTNFDKNLPNEKVLPKHSLLYEYFTVYNELTKVKYVTEGMRKPAFLSGEQKKAIVDLLFKTNRKVTVKQLKEDYFKKIECFDSVEISGVEDRFNASLGTYHDLLKIIKDKDFLDNEENEDILEDIVLTLTLFEDREMIEERLKTYAHLFDDKVMKQLKRRRYTGWGRLSRKLINGIRDKQSGKTILDFLKSDGFANRNFMQLIHDDSLTFKEDIQKAQVSGQGDSLHEHIANLAGSPAIKKGILQTVKVVDELVKVMGRHKPENIVIEMARENQTTQKGQKNSRERMKRIEEGIKELGSQILKEHPVENTQLQNEKLYLYYLQNGRDMYVDQELDINRLSDYDVDHIVPQSFLKDDSIDNKVLTRSDKNRGKSDNVPSEEVVKKMKNYWRQLLNAKLITQRKFDNLTKAERGGLSELDKAGFIKRQLVETRQITKHVAQILDSRMNTKYDENDKLIREVKVITLKSKLVSDFRKDFQFYKVREINNYHHAHDAYLNAVVGTALIKKYPKLESEFVYGDYKVYDVRKMIAKSEQEIGKATAKYFFYSNIMNFFKTEITLANGEIRKRPLIETNGETGEIVWDKGRDFATVRKVLSMPQVNIVKKTEVQTGGFSKESILPKRNSDKLIARKKDWDPKKYGGFDSPTVAYSVLVVAKVEKGKSKKLKSVKELLGITIMERSSFEKNPIDFLEAKGYKEVKKDLIIKLPKYSLFELENGRKRMLASAGELQKGNELALPSKYVNFLYLASHYEKLKGSPEDNEQKQLFVEQHKHYLDEIIEQISEFSKRVILADANLDKVLSAYNKHRDKPIREQAENIIHLFTLTNLGAPAAFKYFDTTIDRKRYTSTKEVLDATLIHQSITGLYETRIDLSQLGGDEGADKRTADGSEFESPKKKRKV

SEQ ID NO: 338 - protein, 1786 aa, synthetic construct
  REGION 1..1786: note = ABE8.17-d polypeptide sequence
  REGION 1..167: note = MISC_FEATURE - Adenosine deaminase sequence
  REGION 168..199: note = MISC_FEATURE - Linker sequence
  REGION 200..365: note = MISC_FEATURE - Adenosine deaminase sequence
  REGION 366..397: note = MISC_FEATURE - Linker sequence
  REGION 398..1764: note = MISC_FEATURE - Sequence derived from Cas9
  REGION 1765..1786: note = MISC_FEATURE - Bipartite nuclear localization sequence
MSEVEFSHEYWMRHALTLAKRAWDEREVPVGAVLVHNNRVIGEGWNRPIGRHDPTAHAEIMALRQGGLVMQNYRLIDATLYVTLEPCVMCAGAMIHSRIGRVVFGARDAKTGAAGSLMDVLHHPGMNHRVEITEGILADECAALLSDFFRMRRQEIKAQKKAQSSTDSGGSSGGSSGSETPGTSESATPESSGGSSGGSSEVEFSHEYWMRHALTLAKRARDEREVPVGAVLVLNNRVIGEGWNRAIGLHDPTAHAEIMALRQGGLVMQNYRLIDATLYSTFEPCVMCAGAMIHSRIGRVVFGVRNAKTGAAGSLMDVLHYPGMNHRVEITEGILADECAALLCYFFRMPRRVFNAQKKAQSSTDSGGSSGGSSGSETPGTSESATPESSGGSSGGSDKKYSIGLAIGTNSVGWAVITDEYKVPSKKFKVLGNTDRHSIKKNLIGALLFDSGETAEATRLKRTARRRYTRRKNRICYLQEIFSNEMAKVDDSFFHRLEESFLVEEDKKHERHPIFGNIVDEVAYHEKYPTIYHLRKKLVDSTDKADLRLIYLALAHMIKFRGHFLIEGDLNPDNSDVDKLFIQLVQTYNQLFEENPINASGVDAKAILSARLSKSRRLENLIAQLPGEKKNGLFGNLIALSLGLTPNFKSNFDLAEDAKLQLSKDTYDDDLDNLLAQIGDQYADLFLAAKNLSDAILLSDILRVNTEITKAPLSASMIKRYDEHHQDLTLLKALVRQQLPEKYKEIFFDQSKNGYAGYIDGGASQEEFYKFIKPILEKMDGTEELLVKLNREDLLRKQRTFDNGSIPHQIHLGELHAILRRQEDFYPFLKDNREKIEKILTFRIPYYVGPLARGNSRFAWMTRKSEETITPWNFEEVVDKGASAQSFIERMTNFDKNLPNEKVLPKHSLLYEYFTVYNELTKVKYVTEGMRKPAFLSGEQKKAIVDLLFKTNRKVTVKQLKEDYFKKIECFDSVEISGVEDRFNASLGTYHDLLKIIKDKDFLDNEENEDILEDIVLTLTLFEDREMIEERLKTYAHLFDDKVMKQLKRRRYTGWGRLSRKLINGIRDKQSGKTILDFLKSDGFANRNFMQLIHDDSLTFKEDIQKAQVSGQGDSLHEHIANLAGSPAIKKGILQTVKVVDELVKVMGRHKPENIVIEMARENQTTQKGQKNSRERMKRIEEGIKELGSQILKEHPVENTQLQNEKLYLYYLQNGRDMYVDQELDINRLSDYDVDHIVPQSFLKDDSIDNKVLTRSDKNRGKSDNVPSEEVVKKMKNYWRQLLNAKLITQRKFDNLTKAERGGLSELDKAGFIKRQLVETRQITKHVAQILDSRMNTKYDENDKLIREVKVITLKSKLVSDFRKDFQFYKVREINNYHHAHDAYLNAVVGTALIKKYPKLESEFVYGDYKVYDVRKMIAKSEQEIGKATAKYFFYSNIMNFFKTEITLANGEIRKRPLIETNGETGEIVWDKGRDFATVRKVLSMPQVNIVKKTEVQTGGFSKESILPKRNSDKLIARKKDWDPKKYGGFDSPTVAYSVLVVAKVEKGKSKKLKSVKELLGITIMERSSFEKNPIDFLEAKGYKEVKKDLIIKLPKYSLFELENGRKRMLASAGELQKGNELALPSKYVNFLYLASHYEKLKGSPEDNEQKQLFVEQHKHYLDEIIEQISEFSKRVILADANLDKVLSAYNKHRDKPIREQAENIIHLFTLTNLGAPAAFKYFDTTIDRKRYTSTKEVLDATLIHQSITGLYETRIDLSQLGGDEGADKRTADGSEFESPKKKRKV

SEQ ID NO: 339 - protein, 1588 aa, synthetic construct
  REGION 1..1588: note = ABE8.20-m polypeptide sequence
  REGION 1..167: note = MISC_FEATURE - Adenosine deaminase sequence
  REGION 168..199: note = MISC_FEATURE - Linker sequence
  REGION 200..1566: note = MISC_FEATURE - Sequence derived from Cas9
  REGION 1567..1588: note = MISC_FEATURE - Bipartite nuclear localization sequence
MSEVEFSHEYWMRHALTLAKRARDEREVPVGAVLVLNNRVIGEGWNRAIGLHDPTAHAEIMALRQGGLVMQNYRLYDATLYSTFEPCVMCAGAMIHSRIGRVVFGVRNAKTGAAGSLMDVLHHPGMNHRVEITEGILADECAALLCRFFRMPRRVFNAQKKAQSSTDSGGSSGGSSGSETPGTSESATPESSGGSSGGSDKKYSIGLAIGTNSVGWAVITDEYKVPSKKFKVLGNTDRHSIKKNLIGALLFDSGETAEATRLKRTARRRYTRRKNRICYLQEIFSNEMAKVDDSFFHRLEESFLVEEDKKHERHPIFGNIVDEVAYHEKYPTIYHLRKKLVDSTDKADLRLIYLALAHMIKFRGHFLIEGDLNPDNSDVDKLFIQLVQTYNQLFEENPINASGVDAKAILSARLSKSRRLENLIAQLPGEKKNGLFGNLIALSLGLTPNFKSNFDLAEDAKLQLSKDTYDDDLDNLLAQIGDQYADLFLAAKNLSDAILLSDILRVNTEITKAPLSASMIKRYDEHHQDLTLLKALVRQQLPEKYKEIFFDQSKNGYAGYIDGGASQEEFYKFIKPILEKMDGTEELLVKLNREDLLRKQRTFDNGSIPHQIHLGELHAILRRQEDFYPFLKDNREKIEKILTFRIPYYVGPLARGNSRFAWMTRKSEETITPWNFEEVVDKGASAQSFIERMTNFDKNLPNEKVLPKHSLLYEYFTVYNELTKVKYVTEGMRKPAFLSGEQKKAIVDLLFKTNRKVTVKQLKEDYFKKIECFDSVEISGVEDRFNASLGTYHDLLKIIKDKDFLDNEENEDILEDIVLTLTLFEDREMIEERLKTYAHLFDDKVMKQLKRRRYTGWGRLSRKLINGIRDKQSGKTILDFLKSDGFANRNFMQLIHDDSLTFKEDIQKAQVSGQGDSLHEHIANLAGSPAIKKGILQTVKVVDELVKVMGRHKPENIVIEMARENQTTQKGQKNSRERMKRIEEGIKELGSQILKEHPVENTQLQNEKLYLYYLQNGRDMYVDQELDINRLSDYDVDHIVPQSFLKDDSIDNKVLTRSDKNRGKSDNVPSEEVVKKMKNYWRQLLNAKLITQRKFDNLTKAERGGLSELDKAGFIKRQLVETRQITKHVAQILDSRMNTKYDENDKLIREVKVITLKSKLVSDFRKDFQFYKVREINNYHHAHDAYLNAVVGTALIKKYPKLESEFVYGDYKVYDVRKMIAKSEQEIGKATAKYFFYSNIMNFFKTEITLANGEIRKRPLIETNGETGEIVWDKGRDFATVRKVLSMPQVNIVKKTEVQTGGFSKESILPKRNSDKLIARKKDWDPKKYGGFDSPTVAYSVLVVAKVEKGKSKKLKSVKELLGITIMERSSFEKNPIDFLEAKGYKEVKKDLIIKLPKYSLFELENGRKRMLASAGELQKGNELALPSKYVNFLYLASHYEKLKGSPEDNEQKQLFVEQHKHYLDEIIEQISEFSKRVILADANLDKVLSAYNKHRDKPIREQAENIIHLFTLTNLGAPAAFKYFDTTIDRKRYTSTKEVLDATLIHQSITGLYETRIDLSQLGGDEGADKRTADGSEFESPKKKRKV

SEQ ID NO: 340 - protein, 1786 aa, synthetic construct
  REGION 1..1786: note = ABE8.20-d polypeptide sequence
  REGION 1..167: note = MISC_FEATURE - Adenosine deaminase sequence
  REGION 168..199: note = MISC_FEATURE - Linker sequence
  REGION 200..365: note = MISC_FEATURE - Adenosine deaminase sequence
  REGION 366..397: note = MISC_FEATURE - Linker sequence
  REGION 398..1764: note = MISC_FEATURE - Sequence derived from Cas9
  REGION 1765..1786: note = MISC_FEATURE - Bipartite nuclear localization sequence
MSEVEFSHEYWMRHALTLAKRAWDEREVPVGAVLVHNNRVIGEGWNRPIGRHDPTAHAEIMALRQGGLVMQNYRLIDATLYVTLEPCVMCAGAMIHSRIGRVVFGARDAKTGAAGSLMDVLHHPGMNHRVEITEGILADECAALLSDFFRMRRQEIKAQKKAQSSTDSGGSSGGSSGSETPGTSESATPESSGGSSGGSSEVEFSHEYWMRHALTLAKRARDEREVPVGAVLVLNNRVIGEGWNRAIGLHDPTAHAEIMALRQGGLVMQNYRLYDATLYSTFEPCVMCAGAMIHSRIGRVVFGVRNAKTGAAGSLMDVLHHPGMNHRVEITEGILADECAALLCRFFRMPRRVFNAQKKAQSSTDSGGSSGGSSGSETPGTSESATPESSGGSSGGSDKKYSIGLAIGTNSVGWAVITDEYKVPSKKFKVLGNTDRHSIKKNLIGALLFDSGETAEATRLKRTARRRYTRRKNRICYLQEIFSNEMAKVDDSFFHRLEESFLVEEDKKHERHPIFGNIVDEVAYHEKYPTIYHLRKKLVDSTDKADLRLIYLALAHMIKFRGHFLIEGDLNPDNSDVDKLFIQLVQTYNQLFEENPINASGVDAKAILSARLSKSRRLENLIAQLPGEKKNGLFGNLIALSLGLTPNFKSNFDLAEDAKLQLSKDTYDDDLDNLLAQIGDQYADLFLAAKNLSDAILLSDILRVNTEITKAPLSASMIKRYDEHHQDLTLLKALVRQQLPEKYKEIFFDQSKNGYAGYIDGGASQEEFYKFIKPILEKMDGTEELLVKLNREDLLRKQRTFDNGSIPHQIHLGELHAILRRQEDFYPFLKDNREKIEKILTFRIPYYVGPLARGNSRFAWMTRKSEETITPWNFEEVVDKGASAQSFIERMTNFDKNLPNEKVLPKHSLLYEYFTVYNELTKVKYVTEGMRKPAFLSGEQKKAIVDLLFKTNRKVTVKQLKEDYFKKIECFDSVEISGVEDRFNASLGTYHDLLKIIKDKDFLDNEENEDILEDIVLTLTLFEDREMIEERLKTYAHLFDDKVMKQLKRRRYTGWGRLSRKLINGIRDKQSGKTILDFLKSDGFANRNFMQLIHDDSLTFKEDIQKAQVSGQGDSLHEHIANLAGSPAIKKGILQTVKVVDELVKVMGRHKPENIVIEMARENQTTQKGQKNSRERMKRIEEGIKELGSQILKEHPVENTQLQNEKLYLYYLQNGRDMYVDQELDINRLSDYDVDHIVPQSFLKDDSIDNKVLTRSDKNRGKSDNVPSEEVVKKMKNYWRQLLNAKLITQRKFDNLTKAERGGLSELDKAGFIKRQLVETRQITKHVAQILDSRMNTKYDENDKLIREVKVITLKSKLVSDFRKDFQFYKVREINNYHHAHDAYLNAVVGTALIKKYPKLESEFVYGDYKVYDVRKMIAKSEQEIGKATAKYFFYSNIMNFFKTEITLANGEIRKRPLIETNGETGEIVWDKGRDFATVRKVLSMPQVNIVKKTEVQTGGFSKESILPKRNSDKLIARKKDWDPKKYGGFDSPTVAYSVLVVAKVEKGKSKKLKSVKELLGITIMERSSFEKNPIDFLEAKGYKEVKKDLIIKLPKYSLFELENGRKRMLASAGELQKGNELALPSKYVNFLYLASHYEKLKGSPEDNEQKQLFVEQHKHYLDEIIEQISEFSKRVILADANLDKVLSAYNKHRDKPIREQAENIIHLFTLTNLGAPAAFKYFDTTIDRKRYTSTKEVLDATLIHQSITGLYETRIDLSQLGGDEGADKRTADGSEFESPKKKRKV

SEQ ID NO: 341 - protein, 1588 aa, synthetic construct
  REGION 1..1588: note = 01. monoABE8.1_bpNLS + Y147T polypeptide sequence
MSEVEFSHEYWMRHALTLAKRARDEREVPVGAVLVLNNRVIGEGWNRAIGLHDPTAHAEIMALRQGGLVMQNYRLIDATLYVTFEPCVMCAGAMIHSRIGRVVFGVRNAKTGAAGSLMDVLHYPGMNHRVEITEGILADECAALLCTFFRMPRQVFNAQKKAQSSTDSGGSSGGSSGSETPGTSESATPESSGGSSGGSDKKYSIGLAIGTNSVGWAVITDEYKVPSKKFKVLGNTDRHSIKKNLIGALLFDSGETAEATRLKRTARRRYTRRKNRICYLQEIFSNEMAKVDDSFFHRLEESFLVEEDKKHERHPIFGNIVDEVAYHEKYPTIYHLRKKLVDSTDKADLRLIYLALAHMIKFRGHFLIEGDLNPDNSDVDKLFIQLVQTYNQLFEENPINASGVDAKAILSARLSKSRRLENLIAQLPGEKKNGLFGNLIALSLGLTPNFKSNFDLAEDAKLQLSKDTYDDDLDNLLAQIGDQYADLFLAAKNLSDAILLSDILRVNTEITKAPLSASMIKRYDEHHQDLTLLKALVRQQLPEKYKEIFFDQSKNGYAGYIDGGASQEEFYKFIKPILEKMDGTEELLVKLNREDLLRKQRTFDNGSIPHQIHLGELHAILRRQEDFYPFLKDNREKIEKILTFRIPYYVGPLARGNSRFAWMTRKSEETITPWNFEEVVDKGASAQSFIERMTNFDKNLPNEKVLPKHSLLYEYFTVYNELTKVKYVTEGMRKPAFLSGEQKKAIVDLLFKTNRKVTVKQLKEDYFKKIECFDSVEISGVEDRFNASLGTYHDLLKIIKDKDFLDNEENEDILEDIVLTLTLFEDREMIEERLKTYAHLFDDKVMKQLKRRRYTGWGRLSRKLINGIRDKQSGKTILDFLKSDGFANRNFMQLIHDDSLTFKEDIQKAQVSGQGDSLHEHIANLAGSPAIKKGILQTVKVVDELVKVMGRHKPENIVIEMARENQTTQKGQKNSRERMKRIEEGIKELGSQILKEHPVENTQLQNEKLYLYYLQNGRDMYVDQELDINRLSDYDVDHIVPQSFLKDDSIDNKVLTRSDKNRGKSDNVPSEEVVKKMKNYWRQLLNAKLITQRKFDNLTKAERGGLSELDKAGFIKRQLVETRQITKHVAQILDSRMNTKYDENDKLIREVKVITLKSKLVSDFRKDFQFYKVREINNYHHAHDAYLNAVVGTALIKKYPKLESEFVYGDYKVYDVRKMIAKSEQEIGKATAKYFFYSNIMNFFKTEITLANGEIRKRPLIETNGETGEIVWDKGRDFATVRKVLSMPQVNIVKKTEVQTGGFSKESILPKRNSDKLIARKKDWDPKKYGGFVSPTVAYSVLVVAKVEKGKSKKLKSVKELLGITIMERSSFEKNPIDFLEAKGYKEVKKDLIIKLPKYSLFELENGRKRMLASARELQKGNELALPSKYVNFLYLASHYEKLKGSPEDNEQKQLFVEQHKHYLDEIIEQISEFSKRVILADANLDKVLSAYNKHRDKPIREQAENIIHLFTLTNLGAPAAFKYFDTTIDRKQYRSTKEVLDATLIHQSITGLYETRIDLSQLGGDEGADKRTADGSEFESPKKKRKV

SEQ ID NO: 342 - protein, 1588 aa, synthetic construct
  REGION 1..1588: note = 02. monoABE8.1_bpNLS + Y147R polypeptide sequence
MSEVEFSHEYWMRHALTLAKRARDEREVPVGAVLVLNNRVIGEGWNRAIGLHDPTAHAEIMALRQGGLVMQNYRLIDATLYVTFEPCVMCAGAMIHSRIGRVVFGVRNAKTGAAGSLMDVLHYPGMNHRVEITEGILADECAALLCRFFRMPRQVFNAQKKAQSSTDSGGSSGGSSGSETPGTSESATPESSGGSSGGSDKKYSIGLAIGTNSVGWAVITDEYKVPSKKFKVLGNTDRHSIKKNLIGALLFDSGETAEATRLKRTARRRYTRRKNRICYLQEIFSNEMAKVDDSFFHRLEESFLVEEDKKHERHPIFGNIVDEVAYHEKYPTIYHLRKKLVDSTDKADLRLIYLALAHMIKFRGHFLIEGDLNPDNSDVDKLFIQLVQTYNQLFEENPINASGVDAKAILSARLSKSRRLENLIAQLPGEKKNGLFGNLIALSLGLTPNFKSNFDLAEDAKLQLSKDTYDDDLDNLLAQIGDQYADLFLAAKNLSDAILLSDILRVNTEITKAPLSASMIKRYDEHHQDLTLLKALVRQQLPEKYKEIFFDQSKNGYAGYIDGGASQEEFYKFIKPILEKMDGTEELLVKLNREDLLRKQRTFDNGSIPHQIHLGELHAILRRQEDFYPFLKDNREKIEKILTFRIPYYVGPLARGNSRFAWMTRKSEETITPWNFEEVVDKGASAQSFIERMTNFDKNLPNEKVLPKHSLLYEYFTVYNELTKVKYVTEGMRKPAFLSGEQKKAIVDLLFKTNRKVTVKQLKEDYFKKIECFDSVEISGVEDRFNASLGTYHDLLKIIKDKDFLDNEENEDILEDIVLTLTLFEDREMIEERLKTYAHLFDDKVMKQLKRRRYTGWGRLSRKLINGIRDKQSGKTILDFLKSDGFANRNFMQLIHDDSLTFKEDIQKAQVSGQGDSLHEHIANLAGSPAIKKGILQTVKVVDELVKVMGRHKPENIVIEMARENQTTQKGQKNSRERMKRIEEGIKELGSQILKEHPVENTQLQNEKLYLYYLQNGRDMYVDQELDINRLSDYDVDHIVPQSFLKDDSIDNKVLTRSDKNRGKSDNVPSEEVVKKMKNYWRQLLNAKLITQRKFDNLTKAERGGLSELDKAGFIKRQLVETRQITKHVAQILDSRMNTKYDENDKLIREVKVITLKSKLVSDFRKDFQFYKVREINNYHHAHDAYLNAVVGTALIKKYPKLESEFVYGDYKVYDVRKMIAKSEQEIGKATAKYFFYSNIMNFFKTEITLANGEIRKRPLIETNGETGEIVWDKGRDFATVRKVLSMPQVNIVKKTEVQTGGFSKESILPKRNSDKLIARKKDWDPKKYGGFVSPTVAYSVLVVAKVEKGKSKKLKSVKELLGITIMERSSFEKNPIDFLEAKGYKEVKKDLIIKLPKYSLFELENGRKRMLASARELQKGNELALPSKYVNFLYLASHYEKLKGSPEDNEQKQLFVEQHKHYLDEIIEQISEFSKRVILADANLDKVLSAYNKHRDKPIREQAENIIHLFTLTNLGAPAAFKYFDTTIDRKQYRSTKEVLDATLIHQSITGLYETRIDLSQLGGDEGADKRTADGSEFESPKKKRKV

SEQ ID NO: 343 - protein, 1588 aa, synthetic construct
  REGION 1..1588: note = 03. monoABE8.1_bpNLS + Q154S polypeptide sequence
MSEVEFSHEYWMRHALTLAKRARDEREVPVGAVLVLNNRVIGEGWNRAIGLHDPTAHAEIMALRQGGLVMQNYRLIDATLYVTFEPCVMCAGAMIHSRIGRVVFGVRNAKTGAAGSLMDVLHYPGMNHRVEITEGILADECAALLCYFFRMPRSVFNAQKKAQSSTDSGGSSGGSSGSETPGTSESATPESSGGSSGGSDKKYSIGLAIGTNSVGWAVITDEYKVPSKKFKVLGNTDRHSIKKNLIGALLFDSGETAEATRLKRTARRRYTRRKNRICYLQEIFSNEMAKVDDSFFHRLEESFLVEEDKKHERHPIFGNIVDEVAYHEKYPTIYHLRKKLVDSTDKADLRLIYLALAHMIKFRGHFLIEGDLNPDNSDVDKLFIQLVQTYNQLFEENPINASGVDAKAILSARLSKSRRLENLIAQLPGEKKNGLFGNLIALSLGLTPNFKSNFDLAEDAKLQLSKDTYDDDLDNLLAQIGDQYADLFLAAKNLSDAILLSDILRVNTEITKAPLSASMIKRYDEHHQDLTLLKALVRQQLPEKYKEIFFDQSKNGYAGYIDGGASQEEFYKFIKPILEKMDGTEELLVKLNREDLLRKQRTFDNGSIPHQIHLGELHAILRRQEDFYPFLKDNREKIEKILTFRIPYYVGPLARGNSRFAWMTRKSEETITPWNFEEVVDKGASAQSFIERMTNFDKNLPNEKVLPKHSLLYEYFTVYNELTKVKYVTEGMRKPAFLSGEQKKAIVDLLFKTNRKVTVKQLKEDYFKKIECFDSVEISGVEDRFNASLGTYHDLLKIIKDKDFLDNEENEDILEDIVLTLTLFEDREMIEERLKTYAHLFDDKVMKQLKRRRYTGWGRLSRKLINGIRDKQSGKTILDFLKSDGFANRNFMQLIHDDSLTFKEDIQKAQVSGQGDSLHEHIANLAGSPAIKKGILQTVKVVDELVKVMGRHKPENIVIEMARENQTTQKGQKNSRERMKRIEEGIKELGSQILKEHPVENTQLQNEKLYLYYLQNGRDMYVDQELDINRLSDYDVDHIVPQSFLKDDSIDNKVLTRSDKNRGKSDNVPSEEVVKKMKNYWRQLLNAKLITQRKFDNLTKAERGGLSELDKAGFIKRQLVETRQITKHVAQILDSRMNTKYDENDKLIREVKVITLKSKLVSDFRKDFQFYKVREINNYHHAHDAYLNAVVGTALIKKYPKLESEFVYGDYKVYDVRKMIAKSEQEIGKATAKYFFYSNIMNFFKTEITLANGEIRKRPLIETNGETGEIVWDKGRDFATVRKVLSMPQVNIVKKTEVQTGGFSKESILPKRNSDKLIARKKDWDPKKYGGFVSPTVAYSVLVVAKVEKGKSKKLKSVKELLGITIMERSSFEKNPIDFLEAKGYKEVKKDLIIKLPKYSLFELENGRKRMLASARELQKGNELALPSKYVNFLYLASHYEKLKGSPEDNEQKQLFVEQHKHYLDEIIEQISEFSKRVILADANLDKVLSAYNKHRDKPIREQAENIIHLFTLTNLGAPAAFKYFDTTIDRKQYRSTKEVLDATLIHQSITGLYETRIDLSQLGGDEGADKRTADGSEFESPKKKRKV

SEQ ID NO: 344 - protein, 1588 aa, synthetic construct
  REGION 1..1588: note = 04. monoABE8.1_bpNLS + Y123H polypeptide sequence
MSEVEFSHEYWMRHALTLAKRARDEREVPVGAVLVLNNRVIGEGWNRAIGLHDPTAHAEIMALRQGGLVMQNYRLIDATLYVTFEPCVMCAGAMIHSRIGRVVFGVRNAKTGAAGSLMDVLHHPGMNHRVEITEGILADECAALLCYFFRMPRQVFNAQKKAQSSTDSGGSSGGSSGSETPGTSESATPESSGGSSGGSDKKYSIGLAIGTNSVGWAVITDEYKVPSKKFKVLGNTDRHSIKKNLIGALLFDSGETAEATRLKRTARRRYTRRKNRICYLQEIFSNEMAKVDDSFFHRLEESFLVEEDKKHERHPIFGNIVDEVAYHEKYPTIYHLRKKLVDSTDKADLRLIYLALAHMIKFRGHFLIEGDLNPDNSDVDKLFIQLVQTYNQLFEENPINASGVDAKAILSARLSKSRRLENLIAQLPGEKKNGLFGNLIALSLGLTPNFKSNFDLAEDAKLQLSKDTYDDDLDNLLAQIGDQYADLFLAAKNLSDAILLSDILRVNTEITKAPLSASMIKRYDEHHQDLTLLKALVRQQLPEKYKEIFFDQSKNGYAGYIDGGASQEEFYKFIKPILEKMDGTEELLVKLNREDLLRKQRTFDNGSIPHQIHLGELHAILRRQEDFYPFLKDNREKIEKILTFRIPYYVGPLARGNSRFAWMTRKSEETITPWNFEEVVDKGASAQSFIERMTNFDKNLPNEKVLPKHSLLYEYFTVYNELTKVKYVTEGMRKPAFLSGEQKKAIVDLLFKTNRKVTVKQLKEDYFKKIECFDSVEISGVEDRFNASLGTYHDLLKIIKDKDFLDNEENEDILEDIVLTLTLFEDREMIEERLKTYAHLFDDKVMKQLKRRRYTGWGRLSRKLINGIRDKQSGKTILDFLKSDGFANRNFMQLIHDDSLTFKEDIQKAQVSGQGDSLHEHIANLAGSPAIKKGILQTVKVVDELVKVMGRHKPENIVIEMARENQTTQKGQKNSRERMKRIEEGIKELGSQILKEHPVENTQLQNEKLYLYYLQNGRDMYVDQELDINRLSDYDVDHIVPQSFLKDDSIDNKVLTRSDKNRGKSDNVPSEEVVKKMKNYWRQLLNAKLITQRKFDNLTKAERGGLSELDKAGFIKRQLVETRQITKHVAQILDSRMNTKYDENDKLIREVKVITLKSKLVSDFRKDFQFYKVREINNYHHAHDAYLNAVVGTALIKKYPKLESEFVYGDYKVYDVRKMIAKSEQEIGKATAKYFFYSNIMNFFKTEITLANGEIRKRPLIETNGETGEIVWDKGRDFATVRKVLSMPQVNIVKKTEVQTGGFSKESILPKRNSDKLIARKKDWDPKKYGGFVSPTVAYSVLVVAKVEKGKSKKLKSVKELLGITIMERSSFEKNPIDFLEAKGYKEVKKDLIIKLPKYSLFELENGRKRMLASARELQKGNELALPSKYVNFLYLASHYEKLKGSPEDNEQKQLFVEQHKHYLDEIIEQISEFSKRVILADANLDKVLSAYNKHRDKPIREQAENIIHLFTLTNLGAPAAFKYFDTTIDRKQYRSTKEVLDATLIHQSITGLYETRIDLSQLGGDEGADKRTADGSEFESPKKKRKV

SEQ ID NO: 345 - protein, 1588 aa, synthetic construct
  REGION 1..1588: note = 05. monoABE8.1_bpNLS + V82S polypeptide sequence
MSEVEFSHEYWMRHALTLAKRARDEREVPVGAVLVLNNRVIGEGWNRAIGLHDPTAHAEIMALRQGGLVMQNYRLIDATLYSTFEPCVMCAGAMIHSRIGRVVFGVRNAKTGAAGSLMDVLHYPGMNHRVEITEGILADECAALLCYFFRMPRQVFNAQKKAQSSTDSGGSSGGSSGSETPGTSESATPESSGGSSGGSDKKYSIGLAIGTNSVGWAVITDEYKVPSKKFKVLGNTDRHSIKKNLIGALLFDSGETAEATRLKRTARRRYTRRKNRICYLQEIFSNEMAKVDDSFFHRLEESFLVEEDKKHERHPIFGNIVDEVAYHEKYPTIYHLRKKLVDSTDKADLRLIYLALAHMIKFRGHFLIEGDLNPDNSDVDKLFIQLVQTYNQLFEENPINASGVDAKAILSARLSKSRRLENLIAQLPGEKKNGLFGNLIALSLGLTPNFKSNFDLAEDAKLQLSKDTYDDDLDNLLAQIGDQYADLFLAAKNLSDAILLSDILRVNTEITKAPLSASMIKRYDEHHQDLTLLKALVRQQLPEKYKEIFFDQSKNGYAGYIDGGASQEEFYKFIKPILEKMDGTEELLVKLNREDLLRKQRTFDNGSIPHQIHLGELHAILRRQEDFYPFLKDNREKIEKILTFRIPYYVGPLARGNSRFAWMTRKSEETITPWNFEEVVDKGASAQSFIERMTNFDKNLPNEKVLPKHSLLYEYFTVYNELTKVKYVTEGMRKPAFLSGEQKKAIVDLLFKTNRKVTVKQLKEDYFKKIECFDSVEISGVEDRFNASLGTYHDLLKIIKDKDFLDNEENEDILEDIVLTLTLFEDREMIEERLKTYAHLFDDKVMKQLKRRRYTGWGRLSRKLINGIRDKQSGKTILDFLKSDGFANRNFMQLIHDDSLTFKEDIQKAQVSGQGDSLHEHIANLAGSPAIKKGILQTVKVVDELVKVMGRHKPENIVIEMARENQTTQKGQKNSRERMKRIEEGIKELGSQILKEHPVENTQLQNEKLYLYYLQNGRDMYVDQELDINRLSDYDVDHIVPQSFLKDDSIDNKVLTRSDKNRGKSDNVPSEEVVKKMKNYWRQLLNAKLITQRKFDNLTKAERGGLSELDKAGFIKRQLVETRQITKHVAQILDSRMNTKYDENDKLIREVKVITLKSKLVSDFRKDFQFYKVREINNYHHAHDAYLNAVVGTALIKKYPKLESEFVYGDYKVYDVRKMIAKSEQEIGKATAKYFFYSNIMNFFKTEITLANGEIRKRPLIETNGETGEIVWDKGRDFATVRKVLSMPQVNIVKKTEVQTGGFSKESILPKRNSDKLIARKKDWDPKKYGGFVSPTVAYSVLVVAKVEKGKSKKLKSVKELLGITIMERSSFEKNPIDFLEAKGYKEVKKDLIIKLPKYSLFELENGRKRMLASARELQKGNELALPSKYVNFLYLASHYEKLKGSPEDNEQKQLFVEQHKHYLDEIIEQISEFSKRVILADANLDKVLSAYNKHRDKPIREQAENIIHLFTLTNLGAPAAFKYFDTTIDRKQYRSTKEVLDATLIHQSITGLYETRIDLSQLGGDEGADKRTADGSEFESPKKKRKV

SEQ ID NO: 346 - protein, 1588 aa, synthetic construct
  REGION 1..1588: note = 06. monoABE8.1_bpNLS + T166R polypeptide sequence
MSEVEFSHEYWMRHALTLAKRARDEREVPVGAVLVLNNRVIGEGWNRAIGLHDPTAHAEIMALRQGGLVMQNYRLIDATLYVTFEPCVMCAGAMIHSRIGRVVFGVRNAKTGAAGSLMDVLHYPGMNHRVEITEGILADECAALLCYFFRMPRQVFNAQKKAQSSRDSGGSSGGSSGSETPGTSESATPESSGGSSGGSDKKYSIGLAIGTNSVGWAVITDEYKVPSKKFKVLGNTDRHSIKKNLIGALLFDSGETAEATRLKRTARRRYTRRKNRICYLQEIFSNEMAKVDDSFFHRLEESFLVEEDKKHERHPIFGNIVDEVAYHEKYPTIYHLRKKLVDSTDKADLRLIYLALAHMIKFRGHFLIEGDLNPDNSDVDKLFIQLVQTYNQLFEENPINASGVDAKAILSARLSKSRRLENLIAQLPGEKKNGLFGNLIALSLGLTPNFKSNFDLAEDAKLQLSKDTYDDDLDNLLAQIGDQYADLFLAAKNLSDAILLSDILRVNTEITKAPLSASMIKRYDEHHQDLTLLKALVRQQLPEKYKEIFFDQSKNGYAGYIDGGASQEEFYKFIKPILEKMDGTEELLVKLNREDLLRKQRTFDNGSIPHQIHLGELHAILRRQEDFYPFLKDNREKIEKILTFRIPYYVGPLARGNSRFAWMTRKSEETITPWNFEEVVDKGASAQSFIERMTNFDKNLPNEKVLPKHSLLYEYFTVYNELTKVKYVTEGMRKPAFLSGEQKKAIVDLLFKTNRKVTVKQLKEDYFKKIECFDSVEISGVEDRFNASLGTYHDLLKIIKDKDFLDNEENEDILEDIVLTLTLFEDREMIEERLKTYAHLFDDKVMKQLKRRRYTGWGRLSRKLINGIRDKQSGKTILDFLKSDGFANRNFMQLIHDDSLTFKEDIQKAQVSGQGDSLHEHIANLAGSPAIKKGILQTVKVVDELVKVMGRHKPENIVIEMARENQTTQKGQKNSRERMKRIEEGIKELGSQILKEHPVENTQLQNEKLYLYYLQNGRDMYVDQELDINRLSDYDVDHIVPQSFLKDDSIDNKVLTRSDKNRGKSDNVPSEEVVKKMKNYWRQLLNAKLITQRKFDNLTKAERGGLSELDKAGFIKRQLVETRQITKHVAQILDSRMNTKYDENDKLIREVKVITLKSKLVSDFRKDFQFYKVREINNYHHAHDAYLNAVVGTALIKKYPKLESEFVYGDYKVYDVRKMIAKSEQEIGKATAKYFFYSNIMNFFKTEITLANGEIRKRPLIETNGETGEIVWDKGRDFATVRKVLSMPQVNIVKKTEVQTGGFSKESILPKRNSDKLIARKKDWDPKKYGGFVSPTVAYSVLVVAKVEKGKSKKLKSVKELLGITIMERSSFEKNPIDFLEAKGYKEVKKDLIIKLPKYSLFELENGRKRMLASARELQKGNELALPSKYVNFLYLASHYEKLKGSPEDNEQKQLFVEQHKHYLDEIIEQISEFSKRVILADANLDKVLSAYNKHRDKPIREQAENIIHLFTLTNLGAPAAFKYFDTTIDRKQYRSTKEVLDATLIHQSITGLYETRIDLSQLGGDEGADKRTADGSEFESPKKKRKV

SEQ ID NO: 347 - protein, 1588 aa, synthetic construct
  REGION 1..1588: note = 07. monoABE8.1_bpNLS + Q154R polypeptide sequence
MSEVEFSHEYWMRHALTLAKRARDEREVPVGAVLVLNNRVIGEGWNRAIGLHDPTAHAEIMALRQGGLVMQNYRLIDATLYVTFEPCVMCAGAMIHSRIGRVVFGVRNAKTGAAGSLMDVLHYPGMNHRVEITEGILADECAALLCYFFRMPRRVFNAQKKAQSSTDSGGSSGGSSGSETPGTSESATPESSGGSSGGSDKKYSIGLAIGTNSVGWAVITDEYKVPSKKFKVLGNTDRHSIKKNLIGALLFDSGETAEATRLKRTARRRYTRRKNRICYLQEIFSNEMAKVDDSFFHRLEESFLVEEDKKHERHPIFGNIVDEVAYHEKYPTIYHLRKKLVDSTDKADLRLIYLALAHMIKFRGHFLIEGDLNPDNSDVDKLFIQLVQTYNQLFEENPINASGVDAKAILSARLSKSRRLENLIAQLPGEKKNGLFGNLIALSLGLTPNFKSNFDLAEDAKLQLSKDTYDDDLDNLLAQIGDQYADLFLAAKNLSDAILLSDILRVNTEITKAPLSASMIKRYDEHHQDLTLLKALVRQQLPEKYKEIFFDQSKNGYAGYIDGGASQEEFYKFIKPILEKMDGTEELLVKLNREDLLRKQRTFDNGSIPHQIHLGELHAILRRQEDFYPFLKDNREKIEKILTFRIPYYVGPLARGNSRFAWMTRKSEETITPWNFEEVVDKGASAQSFIERMTNFDKNLPNEKVLPKHSLLYEYFTVYNELTKVKYVTEGMRKPAFLSGEQKKAIVDLLFKTNRKVTVKQLKEDYFKKIECFDSVEISGVEDRFNASLGTYHDLLKIIKDKDFLDNEENEDILEDIVLTLTLFEDREMIEERLKTYAHLFDDKVMKQLKRRRYTGWGRLSRKLINGIRDKQSGKTILDFLKSDGFANRNFMQLIHDDSLTFKEDIQKAQVSGQGDSLHEHIANLAGSPAIKKGILQTVKVVDELVKVMGRHKPENIVIEMARENQTTQKGQKNSRERMKRIEEGIKELGSQILKEHPVENTQLQNEKLYLYYLQNGRDMYVDQELDINRLSDYDVDHIVPQSFLKDDSIDNKVLTRSDKNRGKSDNVPSEEVVKKMKNYWRQLLNAKLITQRKFDNLTKAERGGLSELDKAGFIKRQLVETRQITKHVAQILDSRMNTKYDENDKLIREVKVITLKSKLVSDFRKDFQFYKVREINNYHHAHDAYLNAVVGTALIKKYPKLESEFVYGDYKVYDVRKMIAKSEQEIGKATAKYFFYSNIMNFFKTEITLANGEIRKRPLIETNGETGEIVWDKGRDFATVRKVLSMPQVNIVKKTEVQTGGFSKESILPKRNSDKLIARKKDWDPKKYGGFVSPTVAYSVLVVAKVEKGKSKKLKSVKELLGITIMERSSFEKNPIDFLEAKGYKEVKKDLIIKLPKYSLFELENGRKRMLASARELQKGNELALPSKYVNFLYLASHYEKLKGSPEDNEQKQLFVEQHKHYLDEIIEQISEFSKRVILADANLDKVLSAYNKHRDKPIREQAENIIHLFTLTNLGAPAAFKYFDTTIDRKQYRSTKEVLDATLIHQSITGLYETRIDLSQLGGDEGADKRTADGSEFESPKKKRKV

SEQ ID NO: 348 - protein, 1588 aa, synthetic construct
  REGION 1..1588: note = 08. monoABE8.1_bpNLS +Y147R_Q154R_Y123H polypeptide sequence
MSEVEFSHEYWMRHALTLAKRARDEREVPVGAVLVLNNRVIGEGWNRAIGLHDPTAHAEIMALRQGGLVMQNYRLIDATLYVTFEPCVMCAGAMIHSRIGRVVFGVRNAKTGAAGSLMDVLHHPGMNHRVEITEGILADECAALLCRFFRMPRRVFNAQKKAQSSTDSGGSSGGSSGSETPGTSESATPESSGGSSGGSDKKYSIGLAIGTNSVGWAVITDEYKVPSKKFKVLGNTDRHSIKKNLIGALLFDSGETAEATRLKRTARRRYTRRKNRICYLQEIFSNEMAKVDDSFFHRLEESFLVEEDKKHERHPIFGNIVDEVAYHEKYPTIYHLRKKLVDSTDKADLRLIYLALAHMIKFRGHFLIEGDLNPDNSDVDKLFIQLVQTYNQLFEENPINASGVDAKAILSARLSKSRRLENLIAQLPGEKKNGLFGNLIALSLGLTPNFKSNFDLAEDAKLQLSKDTYDDDLDNLLAQIGDQYADLFLAAKNLSDAILLSDILRVNTEITKAPLSASMIKRYDEHHQDLTLLKALVRQQLPEKYKEIFFDQSKNGYAGYIDGGASQEEFYKFIKPILEKMDGTEELLVKLNREDLLRKQRTFDNGSIPHQIHLGELHAILRRQEDFYPFLKDNREKIEKILTFRIPYYVGPLARGNSRFAWMTRKSEETITPWNFEEVVDKGASAQSFIERMTNFDKNLPNEKVLPKHSLLYEYFTVYNELTKVKYVTEGMRKPAFLSGEQKKAIVDLLFKTNRKVTVKQLKEDYFKKIECFDSVEISGVEDRFNASLGTYHDLLKIIKDKDFLDNEENEDILEDIVLTLTLFEDREMIEERLKTYAHLFDDKVMKQLKRRRYTGWGRLSRKLINGIRDKQSGKTILDFLKSDGFANRNFMQLIHDDSLTFKEDIQKAQVSGQGDSLHEHIANLAGSPAIKKGILQTVKVVDELVKVMGRHKPENIVIEMARENQTTQKGQKNSRERMKRIEEGIKELGSQILKEHPVENTQLQNEKLYLYYLQNGRDMYVDQELDINRLSDYDVDHIVPQSFLKDDSIDNKVLTRSDKNRGKSDNVPSEEVVKKMKNYWRQLLNAKLITQRKFDNLTKAERGGLSELDKAGFIKRQLVETRQITKHVAQILDSRMNTKYDENDKLIREVKVITLKSKLVSDFRKDFQFYKVREINNYHHAHDAYLNAVVGTALIKKYPKLESEFVYGDYKVYDVRKMIAKSEQEIGKATAKYFFYSNIMNFFKTEITLANGEIRKRPLIETNGETGEIVWDKGRDFATVRKVLSMPQVNIVKKTEVQTGGFSKESILPKRNSDKLIARKKDWDPKKYGGFVSPTVAYSVLVVAKVEKGKSKKLKSVKELLGITIMERSSFEKNPIDFLEAKGYKEVKKDLIIKLPKYSLFELENGRKRMLASARELQKGNELALPSKYVNFLYLASHYEKLKGSPEDNEQKQLFVEQHKHYLDEIIEQISEFSKRVILADANLDKVLSAYNKHRDKPIREQAENIIHLFTLTNLGAPAAFKYFDTTIDRKQYRSTKEVLDATLIHQSITGLYETRIDLSQLGGDEGADKRTADGSEFESPKKKRKV

SEQ ID NO: 349 - protein, 1588 aa, synthetic construct
  REGION 1..1588: note = 09. monoABE8.1_bpNLS +Y147R_Q154R_I76Y polypeptide sequence
MSEVEFSHEYWMRHALTLAKRARDEREVPVGAVLVLNNRVIGEGWNRAIGLHDPTAHAEIMALRQGGLVMQNYRLYDATLYVTFEPCVMCAGAMIHSRIGRVVFGVRNAKTGAAGSLMDVLHYPGMNHRVEITEGILADECAALLCRFFRMPRRVFNAQKKAQSSTDSGGSSGGSSGSETPGTSESATPESSGGSSGGSDKKYSIGLAIGTNSVGWAVITDEYKVPSKKFKVLGNTDRHSIKKNLIGALLFDSGETAEATRLKRTARRRYTRRKNRICYLQEIFSNEMAKVDDSFFHRLEESFLVEEDKKHERHPIFGNIVDEVAYHEKYPTIYHLRKKLVDSTDKADLRLIYLALAHMIKFRGHFLIEGDLNPDNSDVDKLFIQLVQTYNQLFEENPINASGVDAKAILSARLSKSRRLENLIAQLPGEKKNGLFGNLIALSLGLTPNFKSNFDLAEDAKLQLSKDTYDDDLDNLLAQIGDQYADLFLAAKNLSDAILLSDILRVNTEITKAPLSASMIKRYDEHHQDLTLLKALVRQQLPEKYKEIFFDQSKNGYAGYIDGGASQEEFYKFIKPILEKMDGTEELLVKLNREDLLRKQRTFDNGSIPHQIHLGELHAILRRQEDFYPFLKDNREKIEKILTFRIPYYVGPLARGNSRFAWMTRKSEETITPWNFEEVVDKGASAQSFIERMTNFDKNLPNEKVLPKHSLLYEYFTVYNELTKVKYVTEGMRKPAFLSGEQKKAIVDLLFKTNRKVTVKQLKEDYFKKIECFDSVEISGVEDRFNASLGTYHDLLKIIKDKDFLDNEENEDILEDIVLTLTLFEDREMIEERLKTYAHLFDDKVMKQLKRRRYTGWGRLSRKLINGIRDKQSGKTILDFLKSDGFANRNFMQLIHDDSLTFKEDIQKAQVSGQGDSLHEHIANLAGSPAIKKGILQTVKVVDELVKVMGRHKPENIVIEMARENQTTQKGQKNSRERMKRIEEGIKELGSQILKEHPVENTQLQNEKLYLYYLQNGRDMYVDQELDINRLSDYDVDHIVPQSFLKDDSIDNKVLTRSDKNRGKSDNVPSEEVVKKMKNYWRQLLNAKLITQRKFDNLTKAERGGLSELDKAGFIKRQLVETRQITKHVAQILDSRMNTKYDENDKLIREVKVITLKSKLVSDFRKDFQFYKVREINNYHHAHDAYLNAVVGTALIKKYPKLESEFVYGDYKVYDVRKMIAKSEQEIGKATAKYFFYSNIMNFFKTEITLANGEIRKRPLIETNGETGEIVWDKGRDFATVRKVLSMPQVNIVKKTEVQTGGFSKESILPKRNSDKLIARKKDWDPKKYGGFVSPTVAYSVLVVAKVEKGKSKKLKSVKELLGITIMERSSFEKNPIDFLEAKGYKEVKKDLIIKLPKYSLFELENGRKRMLASARELQKGNELALPSKYVNFLYLASHYEKLKGSPEDNEQKQLFVEQHKHYLDEIIEQISEFSKRVILADANLDKVLSAYNKHRDKPIREQAENIIHLFTLTNLGAPAAFKYFDTTIDRKQYRSTKEVLDATLIHQSITGLYETRIDLSQLGGDEGADKRTADGSEFESPKKKRKV

SEQ ID NO: 350 - protein, 1588 aa, synthetic construct
  REGION 1..1588: note = 10. monoABE8.1_bpNLS +Y147R_Q154R_T166R polypeptide sequence
MSEVEFSHEYWMRHALTLAKRARDEREVPVGAVLVLNNRVIGEGWNRAIGLHDPTAHAEIMALRQGGLVMQNYRLIDATLYVTFEPCVMCAGAMIHSRIGRVVFGVRNAKTGAAGSLMDVLHYPGMNHRVEITEGILADECAALLCRFFRMPRRVFNAQKKAQSSRDSGGSSGGSSGSETPGTSESATPESSGGSSGGSDKKYSIGLAIGTNSVGWAVITDEYKVPSKKFKVLGNTDRHSIKKNLIGALLFDSGETAEATRLKRTARRRYTRRKNRICYLQEIFSNEMAKVDDSFFHRLEESFLVEEDKKHERHPIFGNIVDEVAYHEKYPTIYHLRKKLVDSTDKADLRLIYLALAHMIKFRGHFLIEGDLNPDNSDVDKLFIQLVQTYNQLFEENPINASGVDAKAILSARLSKSRRLENLIAQLPGEKKNGLFGNLIALSLGLTPNFKSNFDLAEDAKLQLSKDTYDDDLDNLLAQIGDQYADLFLAAKNLSDAILLSDILRVNTEITKAPLSASMIKRYDEHHQDLTLLKALVRQQLPEKYKEIFFDQSKNGYAGYIDGGASQEEFYKFIKPILEKMDGTEELLVKLNREDLLRKQRTFDNGSIPHQIHLGELHAILRRQEDFYPFLKDNREKIEKILTFRIPYYVGPLARGNSRFAWMTRKSEETITPWNFEEVVDKGASAQSFIERMTNFDKNLPNEKVLPKHSLLYEYFTVYNELTKVKYVTEGMRKPAFLSGEQKKAIVDLLFKTNRKVTVKQLKEDYFKKIECFDSVEISGVEDRFNASLGTYHDLLKIIKDKDFLDNEENEDILEDIVLTLTLFEDREMIEERLKTYAHLFDDKVMKQLKRRRYTGWGRLSRKLINGIRDKQSGKTILDFLKSDGFANRNFMQLIHDDSLTFKEDIQKAQVSGQGDSLHEHIANLAGSPAIKKGILQTVKVVDELVKVMGRHKPENIVIEMARENQTTQKGQKNSRERMKRIEEGIKELGSQILKEHPVENTQLQNEKLYLYYLQNGRDMYVDQELDINRLSDYDVDHIVPQSFLKDDSIDNKVLTRSDKNRGKSDNVPSEEVVKKMKNYWRQLLNAKLITQRKFDNLTKAERGGLSELDKAGFIKRQLVETRQITKHVAQILDSRMNTKYDENDKLIREVKVITLKSKLVSDFRKDFQFYKVREINNYHHAHDAYLNAVVGTALIKKYPKLESEFVYGDYKVYDVRKMIAKSEQEIGKATAKYFFYSNIMNFFKTEITLANGEIRKRPLIETNGETGEIVWDKGRDFATVRKVLSMPQVNIVKKTEVQTGGFSKESILPKRNSDKLIARKKDWDPKKYGGFVSPTVAYSVLVVAKVEKGKSKKLKSVKELLGITIMERSSFEKNPIDFLEAKGYKEVKKDLIIKLPKYSLFELENGRKRMLASARELQKGNELALPSKYVNFLYLASHYEKLKGSPEDNEQKQLFVEQHKHYLDEIIEQISEFSKRVILADANLDKVLSAYNKHRDKPIREQAENIIHLFTLTNLGAPAAFKYFDTTIDRKQYRSTKEVLDATLIHQSITGLYETRIDLSQLGGDEGADKRTADGSEFESPKKKRKV

SEQ ID NO: 351 - protein, 1588 aa, synthetic construct
  REGION 1..1588: note = 11. monoABE8.1_bpNLS +Y147T_Q154R polypeptide sequence
MSEVEFSHEYWMRHALTLAKRARDEREVPVGAVLVLNNRVIGEGWNRAIGLHDPTAHAEIMALRQGGLVMQNYRLIDATLYVTFEPCVMCAGAMIHSRIGRVVFGVRNAKTGAAGSLMDVLHYPGMNHRVEITEGILADECAALLCTFFRMPRRVFNAQKKAQSSTDSGGSSGGSSGSETPGTSESATPESSGGSSGGSDKKYSIGLAIGTNSVGWAVITDEYKVPSKKFKVLGNTDRHSIKKNLIGALLFDSGETAEATRLKRTARRRYTRRKNRICYLQEIFSNEMAKVDDSFFHRLEESFLVEEDKKHERHPIFGNIVDEVAYHEKYPTIYHLRKKLVDSTDKADLRLIYLALAHMIKFRGHFLIEGDLNPDNSDVDKLFIQLVQTYNQLFEENPINASGVDAKAILSARLSKSRRLENLIAQLPGEKKNGLFGNLIALSLGLTPNFKSNFDLAEDAKLQLSKDTYDDDLDNLLAQIGDQYADLFLAAKNLSDAILLSDILRVNTEITKAPLSASMIKRYDEHHQDLTLLKALVRQQLPEKYKEIFFDQSKNGYAGYIDGGASQEEFYKFIKPILEKMDGTEELLVKLNREDLLRKQRTFDNGSIPHQIHLGELHAILRRQEDFYPFLKDNREKIEKILTFRIPYYVGPLARGNSRFAWMTRKSEETITPWNFEEVVDKGASAQSFIERMTNFDKNLPNEKVLPKHSLLYEYFTVYNELTKVKYVTEGMRKPAFLSGEQKKAIVDLLFKTNRKVTVKQLKEDYFKKIECFDSVEISGVEDRFNASLGTYHDLLKIIKDKDFLDNEENEDILEDIVLTLTLFEDREMIEERLKTYAHLFDDKVMKQLKRRRYTGWGRLSRKLINGIRDKQSGKTILDFLKSDGFANRNFMQLIHDDSLTFKEDIQKAQVSGQGDSLHEHIANLAGSPAIKKGILQTVKVVDELVKVMGRHKPENIVIEMARENQTTQKGQKNSRERMKRIEEGIKELGSQILKEHPVENTQLQNEKLYLYYLQNGRDMYVDQELDINRLSDYDVDHIVPQSFLKDDSIDNKVLTRSDKNRGKSDNVPSEEVVKKMKNYWRQLLNAKLITQRKFDNLTKAERGGLSELDKAGFIKRQLVETRQITKHVAQILDSRMNTKYDENDKLIREVKVITLKSKLVSDFRKDFQFYKVREINNYHHAHDAYLNAVVGTALIKKYPKLESEFVYGDYKVYDVRKMIAKSEQEIGKATAKYFFYSNIMNFFKTEITLANGEIRKRPLIETNGETGEIVWDKGRDFATVRKVLSMPQVNIVKKTEVQTGGFSKESILPKRNSDKLIARKKDWDPKKYGGFVSPTVAYSVLVVAKVEKGKSKKLKSVKELLGITIMERSSFEKNPIDFLEAKGYKEVKKDLIIKLPKYSLFELENGRKRMLASARELQKGNELALPSKYVNFLYLASHYEKLKGSPEDNEQKQLFVEQHKHYLDEIIEQISEFSKRVILADANLDKVLSAYNKHRDKPIREQAENIIHLFTLTNLGAPAAFKYFDTTIDRKQYRSTKEVLDATLIHQSITGLYETRIDLSQLGGDEGADKRTADGSEFESPKKKRKV

SEQ ID NO: 352 - protein, 1588 aa, synthetic construct
  REGION 1..1588: note = 12. monoABE8.1_bpNLS +Y147T_Q154S polypeptide sequence
MSEVEFSHEYWMRHALTLAKRARDEREVPVGAVLVLNNRVIGEGWNRAIGLHDPTAHAEIMALRQGGLVMQNYRLIDATLYVTFEPCVMCAGAMIHSRIGRVVFGVRNAKTGAAGSLMDVLHYPGMNHRVEITEGILADECAALLCTFFRMPRSVFNAQKKAQSSTDSGGSSGGSSGSETPGTSESATPESSGGSSGGSDKKYSIGLAIGTNSVGWAVITDEYKVPSKKFKVLGNTDRHSIKKNLIGALLFDSGETAEATRLKRTARRRYTRRKNRICYLQEIFSNEMAKVDDSFFHRLEESFLVEEDKKHERHPIFGNIVDEVAYHEKYPTIYHLRKKLVDSTDKADLRLIYLALAHMIKFRGHFLIEGDLNPDNSDVDKLFIQLVQTYNQLFEENPINASGVDAKAILSARLSKSRRLENLIAQLPGEKKNGLFGNLIALSLGLTPNFKSNFDLAEDAKLQLSKDTYDDDLDNLLAQIGDQYADLFLAAKNLSDAILLSDILRVNTEITKAPLSASMIKRYDEHHQDLTLLKALVRQQLPEKYKEIFFDQSKNGYAGYIDGGASQEEFYKFIKPILEKMDGTEELLVKLNREDLLRKQRTFDNGSIPHQIHLGELHAILRRQEDFYPFLKDNREKIEKILTFRIPYYVGPLARGNSRFAWMTRKSEETITPWNFEEVVDKGASAQSFIERMTNFDKNLPNEKVLPKHSLLYEYFTVYNELTKVKYVTEGMRKPAFLSGEQKKAIVDLLFKTNRKVTVKQLKEDYFKKIECFDSVEISGVEDRFNASLGTYHDLLKIIKDKDFLDNEENEDILEDIVLTLTLFEDREMIEERLKTYAHLFDDKVMKQLKRRRYTGWGRLSRKLINGIRDKQSGKTILDFLKSDGFANRNFMQLIHDDSLTFKEDIQKAQVSGQGDSLHEHIANLAGSPAIKKGILQTVKVVDELVKVMGRHKPENIVIEMARENQTTQKGQKNSRERMKRIEEGIKELGSQILKEHPVENTQLQNEKLYLYYLQNGRDMYVDQELDINRLSDYDVDHIVPQSFLKDDSIDNKVLTRSDKNRGKSDNVPSEEVVKKMKNYWRQLLNAKLITQRKFDNLTKAERGGLSELDKAGFIKRQLVETRQITKHVAQILDSRMNTKYDENDKLIREVKVITLKSKLVSDFRKDFQFYKVREINNYHHAHDAYLNAVVGTALIKKYPKLESEFVYGDYKVYDVRKMIAKSEQEIGKATAKYFFYSNIMNFFKTEITLANGEIRKRPLIETNGETGEIVWDKGRDFATVRKVLSMPQVNIVKKTEVQTGGFSKESILPKRNSDKLIARKKDWDPKKYGGFVSPTVAYSVLVVAKVEKGKSKKLKSVKELLGITIMERSSFEKNPIDFLEAKGYKEVKKDLIIKLPKYSLFELENGRKRMLASARELQKGNELALPSKYVNFLYLASHYEKLKGSPEDNEQKQLFVEQHKHYLDEIIEQISEFSKRVILADANLDKVLSAYNKHRDKPIREQAENIIHLFTLTNLGAPAAFKYFDTTIDRKQYRSTKEVLDATLIHQSITGLYETRIDLSQLGGDEGADKRTADGSEFESPKKKRKV

SEQ ID NO: 353 - protein, 1588 aa, synthetic construct
  REGION 1..1588: note = 13. monoABE8.1_bpNLS +H123Y123H_Y147R_Q154R_I76Y polypeptide sequence
MSEVEFSHEYWMRHALTLAKRARDEREVPVGAVLVLNNRVIGEGWNRAIGLHDPTAHAEIMALRQGGLVMQNYRLYDATLYVTFEPCVMCAGAMIHSRIGRVVFGVRNAKTGAAGSLMDVLHHPGMNHRVEITEGILADECAALLCRFFRMPRRVFNAQKKAQSSTDSGGSSGGSSGSETPGTSESATPESSGGSSGGSDKKYSIGLAIGTNSVGWAVITDEYKVPSKKFKVLGNTDRHSIKKNLIGALLFDSGETAEATRLKRTARRRYTRRKNRICYLQEIFSNEMAKVDDSFFHRLEESFLVEEDKKHERHPIFGNIVDEVAYHEKYPTIYHLRKKLVDSTDKADLRLIYLALAHMIKFRGHFLIEGDLNPDNSDVDKLFIQLVQTYNQLFEENPINASGVDAKAILSARLSKSRRLENLIAQLPGEKKNGLFGNLIALSLGLTPNFKSNFDLAEDAKLQLSKDTYDDDLDNLLAQIGDQYADLFLAAKNLSDAILLSDILRVNTEITKAPLSASMIKRYDEHHQDLTLLKALVRQQLPEKYKEIFFDQSKNGYAGYIDGGASQEEFYKFIKPILEKMDGTEELLVKLNREDLLRKQRTFDNGSIPHQIHLGELHAILRRQEDFYPFLKDNREKIEKILTFRIPYYVGPLARGNSRFAWMTRKSEETITPWNFEEVVDKGASAQSFIERMTNFDKNLPNEKVLPKHSLLYEYFTVYNELTKVKYVTEGMRKPAFLSGEQKKAIVDLLFKTNRKVTVKQLKEDYFKKIECFDSVEISGVEDRFNASLGTYHDLLKIIKDKDFLDNEENEDILEDIVLTLTLFEDREMIEERLKTYAHLFDDKVMKQLKRRRYTGWGRLSRKLINGIRDKQSGKTILDFLKSDGFANRNFMQLIHDDSLTFKEDIQKAQVSGQGDSLHEHIANLAGSPAIKKGILQTVKVVDELVKVMGRHKPENIVIEMARENQTTQKGQKNSRERMKRIEEGIKELGSQILKEHPVENTQLQNEKLYLYYLQNGRDMYVDQELDINRLSDYDVDHIVPQSFLKDDSIDNKVLTRSDKNRGKSDNVPSEEVVKKMKNYWRQLLNAKLITQRKFDNLTKAERGGLSELDKAGFIKRQLVETRQITKHVAQILDSRMNTKYDENDKLIREVKVITLKSKLVSDFRKDFQFYKVREINNYHHAHDAYLNAVVGTALIKKYPKLESEFVYGDYKVYDVRKMIAKSEQEIGKATAKYFFYSNIMNFFKTEITLANGEIRKRPLIETNGETGEIVWDKGRDFATVRKVLSMPQVNIVKKTEVQTGGFSKESILPKRNSDKLIARKKDWDPKKYGGFVSPTVAYSVLVVAKVEKGKSKKLKSVKELLGITIMERSSFEKNPIDFLEAKGYKEVKKDLIIKLPKYSLFELENGRKRMLASARELQKGNELALPSKYVNFLYLASHYEKLKGSPEDNEQKQLFVEQHKHYLDEIIEQISEFSKRVILADANLDKVLSAYNKHRDKPIREQAENIIHLFTLTNLGAPAAFKYFDTTIDRKQYRSTKEVLDATLIHQSITGLYETRIDLSQLGGDEGADKRTADGSEFESPKKKRKV

SEQ ID NO: 354 - protein, 1588 aa, synthetic construct
  REGION 1..1588: note = 14. monoABE8.1_bpNLS + V82S +Q154R polypeptide sequence
MSEVEFSHEYWMRHALTLAKRARDEREVPVGAVLVLNNRVIGEGWNRAIGLHDPTAHAEIMALRQGGLVMQNYRLIDATLYSTFEPCVMCAGAMIHSRIGRVVFGVRNAKTGAAGSLMDVLHYPGMNHRVEITEGILADECAALLCYFFRMPRRVFNAQKKAQSSTDSGGSSGGSSGSETPGTSESATPESSGGSSGGSDKKYSIGLAIGTNSVGWAVITDEYKVPSKKFKVLGNTDRHSIKKNLIGALLFDSGETAEATRLKRTARRRYTRRKNRICYLQEIFSNEMAKVDDSFFHRLEESFLVEEDKKHERHPIFGNIVDEVAYHEKYPTIYHLRKKLVDSTDKADLRLIYLALAHMIKFRGHFLIEGDLNPDNSDVDKLFIQLVQTYNQLFEENPINASGVDAKAILSARLSKSRRLENLIAQLPGEKKNGLFGNLIALSLGLTPNFKSNFDLAEDAKLQLSKDTYDDDLDNLLAQIGDQYADLFLAAKNLSDAILLSDILRVNTEITKAPLSASMIKRYDEHHQDLTLLKALVRQQLPEKYKEIFFDQSKNGYAGYIDGGASQEEFYKFIKPILEKMDGTEELLVKLNREDLLRKQRTFDNGSIPHQIHLGELHAILRRQEDFYPFLKDNREKIEKILTFRIPYYVGPLARGNSRFAWMTRKSEETITPWNFEEVVDKGASAQSFIERMTNFDKNLPNEKVLPKHSLLYEYFTVYNELTKVKYVTEGMRKPAFLSGEQKKAIVDLLFKTNRKVTVKQLKEDYFKKIECFDSVEISGVEDRFNASLGTYHDLLKIIKDKDFLDNEENEDILEDIVLTLTLFEDREMIEERLKTYAHLFDDKVMKQLKRRRYTGWGRLSRKLINGIRDKQSGKTILDFLKSDGFANRNFMQLIHDDSLTFKEDIQKAQVSGQGDSLHEHIANLAGSPAIKKGILQTVKVVDELVKVMGRHKPENIVIEMARENQTTQKGQKNSRERMKRIEEGIKELGSQILKEHPVENTQLQNEKLYLYYLQNGRDMYVDQELDINRLSDYDVDHIVPQSFLKDDSIDNKVLTRSDKNRGKSDNVPSEEVVKKMKNYWRQLLNAKLITQRKFDNLTKAERGGLSELDKAGFIKRQLVETRQITKHVAQILDSRMNTKYDENDKLIREVKVITLKSKLVSDFRKDFQFYKVREINNYHHAHDAYLNAVVGTALIKKYPKLESEFVYGDYKVYDVRKMIAKSEQEIGKATAKYFFYSNIMNFFKTEITLANGEIRKRPLIETNGETGEIVWDKGRDFATVRKVLSMPQVNIVKKTEVQTGGFSKESILPKRNSDKLIARKKDWDPKKYGGFVSPTVAYSVLVVAKVEKGKSKKLKSVKELLGITIMERSSFEKNPIDFLEAKGYKEVKKDLIIKLPKYSLFELENGRKRMLASARELQKGNELALPSKYVNFLYLASHYEKLKGSPEDNEQKQLFVEQHKHYLDEIIEQISEFSKRVILADANLDKVLSAYNKHRDKPIREQAENIIHLFTLTNLGAPAAFKYFDTTIDRKQYRSTKEVLDATLIHQSITGLYETRIDLSQLGGDEGADKRTADGSEFESPKKKRKV

SEQ ID NO: 355 - protein, 4 aa, synthetic construct
  REGION 1..4: note = synthetic peptide sequence
SGGS

SEQ ID NO: 356 - protein, 24 aa, synthetic construct
  REGION 1..24: note = synthetic peptide sequence
SGGSSGSETPGTSESATPESSGGS

SEQ ID NO: 357 - protein, 32 aa, synthetic construct
  REGION 1..32: note = synthetic polypeptide sequence
SGGSSGGSSGSETPGTSESATPESSGGSSGGS

SEQ ID NO: 358 - protein, 104 aa, synthetic construct
  REGION 1..104: note = synthetic polypeptide sequence
GGSGGSPGSPAGSPTSTEEGTSESATPESGPGTSTEPSEGSAPGSPAGSPTSTEEGTSTEPSEGSAPGTSTEPSEGSAPGTSESATPESGPGSEPATSGGSGGS

SEQ ID NO: 359 - protein, 24 aa, synthetic construct
  REGION 1..24: note = synthetic peptide sequence
SGGSSGGSSGSETPGTSESATPES

SEQ ID NO: 360 - protein, 40 aa, synthetic construct
  REGION 1..40: note = synthetic polypeptide sequence
SGGSSGGSSGSETPGTSESATPESSGGSSGGSSGGSSGGS

SEQ ID NO: 361 - protein, 64 aa, synthetic construct
  REGION 1..64: note = synthetic polypeptide sequence
SGGSSGGSSGSETPGTSESATPESSGGSSGGSSGGSSGGSSGSETPGTSESATPESSGGSSGGS

SEQ ID NO: 362 - protein, 92 aa, synthetic construct
  REGION 1..92: note = synthetic polypeptide sequence
PGSPAGSPTSTEEGTSESATPESGPGTSTEPSEGSAPGSPAGSPTSTEEGTSTEPSEGSAPGTSTEPSEGSAPGTSESATPESGPGSEPATS

SEQ ID NO: 363 - protein, 5 aa, synthetic construct
  REGION 1..5: note = synthetic peptide sequence
PAPAP

SEQ ID NO: 364 - protein, 6 aa, synthetic construct
  REGION 1..6: note = synthetic peptide sequence
PAPAPA

SEQ ID NO: 365 - protein, 7 aa, synthetic construct
  REGION 1..7: note = synthetic peptide sequence
PAPAPAP

SEQ ID NO: 366 - protein, 8 aa, synthetic construct
  REGION 1..8: note = synthetic peptide sequence
PAPAPAPA

SEQ ID NO: 367 - protein, 9 aa, synthetic construct
  REGION 1..9: note = synthetic peptide sequence
PAPAPAPAP

SEQ ID NO: 368 - protein, 15 aa, synthetic construct
  REGION 1..15: note = synthetic peptide sequence
PAPAPAPAPAPAPAP

SEQ ID NO: 369 - protein, 21 aa, synthetic construct
  REGION 1..21: note = synthetic peptide sequence
PAPAPAPAPAPAPAPAPAPAP

SEQ ID NO: 370 - DNA, 306 bp, synthetic construct
  misc_feature 1..306: note = DnaE Intein-N polynucleotide sequence
  source 1..306: mol_type = other DNA
tgcctgtcatacgaaaccgagatactgacagtagaatatggccttctgccaatcgggaagattgtggagaaacggatagaatgcacagtttactctgtcgataacaatggtaacatttatactcagccagttgcccagtggcacgaccggggagagcaggaagtattcgaatactgtctggaggatggaagtctcattagggccactaaggaccacaaatttatgacagtcgatggccagatgctgcctatagacgaaatctttgagcgagagttggacctcatgcgagttgacaaccttcctaat

SEQ ID NO: 371 - protein, 102 aa, synthetic construct
  REGION 1..102: note = DnaE Intein-N polypeptide sequence
CLSYETEILTVEYGLLPIGKIVEKRIECTVYSVDNNGNIYTQPVAQWHDRGEQEVFEYCLEDGSLIRATKDHKFMTVDGQMLPIDEIFERELDLMRVDNLPN

SEQ ID NO: 372 - DNA, 108 bp, synthetic construct
  misc_feature 1..108: note = DnaE Intein-C polynucleotide sequence
  source 1..108: mol_type = other DNA
atgatcaagatagctacaaggaagtatcttggcaaacaaaacgtttatgatattggagtcgaaagagatcacaactttgctctgaagaacggattcatagcttctaat

SEQ ID NO: 373 - protein, 36 aa, synthetic construct
  REGION 1..36: note = DnaE Intein-C polypeptide sequence
MIKIATRKYLGKQNVYDIGVERDHNFALKNGFIASN

SEQ ID NO: 374 - DNA, 303 bp, synthetic construct
  misc_feature 1..303: note = Cfa-N polynucleotide sequence
  source 1..303: mol_type = other DNA
tgcctgtcttatgataccgagatacttaccgttgaatatggcttcttgcctattggaaagattgtcgaagagagaattgaatgcacagtatatactgtagacaagaatggtttcgtttacacacagcccattgctcaatggcacaatcgcggcgaacaagaagtatttgagtactgtctcgaggatggaagcatcatacgagcaactaaagatcataaattcatgaccactgacgggcagatgttgccaatagatgagatattcgagcggggcttggatctcaaacaagtggatggattgcca

SEQ ID NO: 375 - protein, 101 aa, synthetic construct
  REGION 1..101: note = Cfa-N polypeptide sequence
CLSYDTEILTVEYGFLPIGKIVEERIECTVYTVDKNGFVYTQPIAQWHNRGEQEVFEYCLEDGSIIRATKDHKFMTTDGQMLPIDEIFERGLDLKQVDGLP

SEQ ID NO: 376 - DNA, 159 bp, synthetic construct
  misc_feature 1..159: note = Cfa-C polynucleotide sequence
  source 1..159: mol_type = other DNA
atgaagaggactgccgatggatcagagtttgaatctcccaagaagaagaggaaagtaaagataatatctcgaaaaagtcttggtacccaaaatgtctatgatattggagtggagaaagatcacaacttccttctcaagaacggtctcgtagccagcaac

SEQ ID NO: 377 - protein, 53 aa, synthetic construct
  REGION 1..53: note = Cfa-C polypeptide sequence
MKRTADGSEFESPKKKRKVKIISRKSLGTQNVYDIGVEKDHNFLLKNGLVASN

SEQ ID NO: 378 - protein, 1081 aa, Neisseria meningitidis
  REGION 1..1081: note = MISC_FEATURE - Nme3Cas9; WP_002217928.1 type II CRISPR RNA-guided endonuclease Cas9 [Neisseria meningitidis]
  REGION 1..1081: note = MISC_FEATURE - NCBI Reference: WP_002217928.1; type II CRISPR RNA-guided endonuclease Cas9; Nme3Cas9 polypeptide sequence
MAAFKPNPINYILGLDIGIASVGWAMVEIDEEENPIRLIDLGVRVFERAEVPKTGDSLAMARRLARSVRRLTRRRAHRLLRARRLLKREGVLQAADFDENGLIKSLPNTPWQLRAAALDRKLTPLEWSAVLLHLIKHRGYLSQRKNEGETADKELGALLKGVADNAHALQTGDFRTPAELALNKFEKECGHIRNQRGDYSHTFSRKDLQAELNLLFEKQKEFGNPHVSGGLKEGIETLLMTQRPALSGDAVQKMLGHCTFEPAEPKAAKNTYTAERFIWLTKLNNLRILEQGSERPLTDTERATLMDEPYRKSKLTYAQARKLLSLEDTAFFKGLRYGKDNAEASTLMEMKAYHTISRALEKEGLKDKKSPLNLSPELQDEIGTAFSLFKTDEDITGRLKDRIQPEILEALLKHISFDKFVQISLKALRRIVPLMEQGKRYDEACAEIYGDHYGKKNTEEKIYLPPIPADEIRNPVVLRALSQARKVINGVVRRYGSPARIHIETAREVGKSFKDRKEIEKRQEENRKDREKAAAKFREYFPNFVGEPKSKDILKLRLYEQQHGKCLYSGKEINLGRLNEKGYVEIDHALPFSRTWDDSFNNKVLVLGSENQNKGNQTPYEYFNGKDNSREWQEFKARVETSRFPRSKKQRILLQKFDEDGFKERNLNDTRYVNRFLCQFVADRMRLTGKGKKRVFASNGQITNLLRGFWGLRKVRAENDRHHALDAVVVACSTVAMQQKITRFVRYKEMNAFDGKTIDKETGEVLHQKTHFPQPWEFFAQEVMIRVFGKPDGKPEFEEADTPEKLRTLLAEKLSSRPEAVHEYVTPLFVSRAPNRKMSGQGHMETVKSAKRLDEGVSVLRVPLTQLKLKDLEKMVNREREPKLYEALKARLEAHKDDPAKAFAEPFYKYDKAGNRTQQVKAVRVEQVQKTGVWVRNHNGIADNATMVRVDVFEKGDKYYLVPIYSWQVAKGILPDRAVVAYADEEDWTVIDESFRFKFVLYSNDLIKVQLKKDSFLGYFSGLDRATGAISLREHDLEKSKGKDGMHRIGVKTALSFQKYQIDEMGKEIRPCRLKKRPPVR

SEQ ID NO: 379 - RNA, 66 nt, synthetic construct
  misc_feature 1..66: note = Telomerase Ku Binding Motif oligonucleotide sequence
  source 1..66: mol_type = other RNA
ttcttgtcgtacttatagatcgctacgttatttcaattttgaaaatctgagtcctgggagtgcgga

SEQ ID NO: 380 - protein, 1094 aa, synthetic construct
  REGION 1..1094: note = Telomerase Ku Heterodimer polypeptide sequence
MSGWESYYKTEGDEEAEEEQEENLEASGDYKYSGRDSLIFLVDASKAMFESQSEDELTPFDMSIQCIQSVYISKIISSDRDLLAVVFYGTEKDKNSVNFKNIYVLQELDNPGAKRILELDQFKGQQGQKRFQDMMGHGSDYSLSEVLWVCANLFSDVQFKMSHKRIMLFTNEDNPHGNDSAKASRARTKAGDLRDTGIFLDLMHLKKPGGFDISLFYRDIISIAEDEDLRVHFEESSKLEDLLRKVRAKETRKRALSRLKLKLNKDIVISVGIYNLVQKALKPPPIKLYRETNEPVKTKTRTFNTSTGGLLLPSDTKRSQIYGSRQIILEKEETEELKRFDDPGLMLMGFKPLVLLKKHHYLRPSLFVYPEESLVIGSSTLFSALLIKCLEKEVAALCRYTPRRNIPPYFVALVPQEEELDDQKIQVTPPGFQLVFLPFADDKRKMPFTEKIMATPEQVGKMKAIVEKLRFTYRSDSFENPVLQQHFRNLEALALDLMEPEQAVDLTLPKVEAMNKRLGSLVDEFKELVYPPDYNPEGKVTKRKHDNEGSGSKRPKVEYSEEELKTHISKGTLGKFTVPMLKEACRAYGLKSGLKKQELLEALTKHFQDMVRSGNKAAVVLCMDVGFTMSNSIPGIESPFEQAKKVITMFVQRQVFAENKDEIALVLFGTDGTDNPLSGGDQYQNITVHRHLMLPDFDLLEDIESKIQPGSQQADFLDALIVSMDVIQHETIGKKFEKRHIEIFTDLSSRFSKSQLDIIIHSLKKCDISERHSIHWPCRLTIGSNLSIRIAAYKSILQERVKKTWTVVDAKTLKKEDIQKETVYCLNDDDETEVLKEDIIQGFRYGSDIVPFSKVDEEQMKYKSEGKCFSVLGFCKSSQVQRRFFMGNQVLKVFAARDDEAAAVALSSLIHALDDLDMVAIVRYAYDKRANPQVGVAFPHIKHNYECLVYVQLPFMEDLRQYMFSSLKNSKKYAPTEAQLNAVDALIDSMSLAKKDEKTDTLEDLFPTTKIPNPRFQRLFQCLLHRALHPREPLPPIQQHIWNMLNPPAEVTTKSQIPLSKIKTLFPLIEAKKKDQVTAQEIFQDNHEDGPTAK

SEQ ID NO: 381 - RNA, 10 nt, synthetic construct
  misc_feature 1..10: note = Telomerase Sm7 consensus site(single stranded) oligonucleotide sequence
  source 1..10: mol_type = other RNA
aatttttgga

SEQ ID NO: 382 - protein, 83 aa, synthetic construct
  REGION 1..83: note = MS2 coat protein polypeptide sequence
GSVIDVSSQRVNVQRPLDALGNSLNSPVIIKLKGDREFRGVLKSFDLHMNLVLNDAEELEDGEVTRRLGTVLIRGDNIVYISP

SEQ ID NO: 383 - RNA, 26 nt, synthetic construct
  misc_feature 1..26: note = PP7 phage operator stem loop oligonucleotide sequence
  source 1..26: mol_type = other RNA
ataaggagtttatatggaaaccctta

SEQ ID NO: 384 - protein, 128 aa, synthetic construct
  REGION 1..128: note = PP7 coat protein (PCP)polypeptide sequence
MSKTIVLSVGEATRTLTEIQSTADRQIFEEKVGPLVGRLRLTASLRQNGAKTAYRVNLKLDQADVVDCSTSVCGELPKVRYTQVWSHDVTIVANSTEASRKSLYDLTKSLVATSQVEDLVVNLVPLGR

SEQ ID NO: 385 - RNA, 19 nt, synthetic construct
  misc_feature 1..19: note = SfMu Com stem loop oligonucleotide sequence
  source 1..19: mol_type = other RNA
ctgaatgcctgcgagcatc

SEQ ID NO: 386 - protein, 62 aa, synthetic construct
  REGION 1..62: note = SfMu Com binding protein polypeptide sequence
MKSIRCKNCNKLLFKADSFDHIEIRCPRCKRHIIMLNACEHPTEKHCGKREKITHSDETVRY

SEQ ID NO: 387 - protein, 47 aa, synthetic construct
  REGION 1..47: note = leucine zipper polypeptide sequence
LEIRAAFLRQRNTALRTEVAELEQEVQRLENEVSQYETRYGPLGGGK

SEQ ID NO: 388 - protein, 47 aa, synthetic construct
  REGION 1..47: note = leucine zipper polypeptide sequence
LEIEAAFLERENTALETRVAELRQRVQRLRNRVSQYRTRYGPLGGGK

SEQ ID NO: 389 - DNA, 303 bp, synthetic construct
  source 1..303: mol_type = other DNA
tgcctgagctacgataccgagatcctgaccgtggaatacggcttcctgcctatcggcaagatcgtcgaggaacggatcgagtgcacagtgtacaccgtggataagaatggcttcgtgtacacccagcctatcgctcagtggcacaacagaggcgagcaagaggtgttcgagtactgcctggaagatggcagcatcatccgggccaccaaggaccacaagtttatgaccaccgacggccagatgctgcccatcgacgagatctttgagagaggcctggacctgaaacaggtggacggactgcct

SEQ ID NO: 390 - protein, 101 aa, synthetic construct; identical to SEQ ID NO: 375

SEQ ID NO: 391 - DNA, 264 bp, synthetic construct
  source 1..264: mol_type = other DNA
tgtctggacctcaagacccaagtgcagacacctcagggcatgaaagagattagcaatatccaggtgggcgacctggtcctgagcaacaccggctacaacgaggtgctgaacgtgttccctaagtccaagaagaaatcttataagatcaccctggaagatggcaaggaaatcatctgcagcgaggaacacctgttccccacccagaccggcgagatgaacatcagcggcggactgaaggagggcatgtgcctgtacgtgaaggag

SEQ ID NO: 392 - protein, 88 aa, synthetic construct
CLDLKTQVQTPQGMKEISNIQVGDLVLSNTGYNEVLNVFPKSKKKSYKITLEDGKEIICSEEHLFPTQTGEMNISGGLKEGMCLYVKE

SEQ ID NO: 393 - DNA, 267 bp, synthetic construct
  source 1..267: mol_type = other DNA
tgcctgagcctggacaccatggtggtgacaaacggcaaggccatcgagatcagagatgtgaaggtgggagattggctggaaagcgaatgtggcccagtgcaggttacagaggtgctgcctatcatcaagcagcctgtctttgagattgtgctgaaaagcggaaaaaagatccgggtgtccgctaatcacaagttccccaccaaggacggcctcaagaccatcaacagcggcctgaaggtgggcgacttcctgagaagcagagccaag

SEQ ID NO: 394 - protein, 89 aa, synthetic construct
CLSLDTMVVTNGKAIEIRDVKVGDWLESECGPVQVTEVLPIIKQPVFEIVLKSGKKIRVSANHKFPTKDGLKTINSGLKVGDFLRSRAK

SEQ ID NO: 395 - DNA, 303 bp, synthetic construct
  source 1..303: mol_type = other DNA
tgttttgtgcctggcaccctggtgaacacagagaatggcctgaagaaaatcgaggaaatcaaggtgggcgacaaggtgttcagccatacaggcaagctgcaggaggtggtggacaccctgatcttcgaccgggacgaggaaatcatctctatcaacggcattgattgcaccaagaaccacgagttctacgtgatcgataaggaaaacgctaatagagtgaacgaggacaacatccacctcttcgccagatgggtccacgccgaggaactggatatgaaaaagcacctgctgatcgagctggaa

SEQ ID NO: 396 - protein, 101 aa, synthetic construct
CFVPGTLVNTENGLKKIEEIKVGDKVFSHTGKLQEVVDTLIFDRDEEIISINGIDCTKNHEFYVIDKENANRVNEDNIHLFARWVHAEELDMKKHLLIELE

SEQ ID NO: 397 - DNA, 315 bp, synthetic construct
  source 1..315: mol_type = other DNA
tgcctggtgggctctagcgagattatcacaagaaactacggcaagaccaccatcaaggaagtggtcgagatcttcgacaacgacaagaatatccaggtgctggccttcaacacccacaccgataatatcgagtgggcccctatcaaggccgctcagctgaccagacctaacgccgagctggttgaactggaaatcgacaccctgcacggcgtgaaaacaatccggtgcacccctgaccaccccgtgtacaccaagaacagaggctacgtgcgggccgacgagctgacagatgatgacgagctcgtggtggctatc

SEQ ID NO: 398 - protein, 105 aa, synthetic construct
CLVGSSEIITRNYGKTTIKEVVEIFDNDKNIQVLAFNTHTDNIEWAPIKAAQLTRPNAELVELEIDTLHGVKTIRCTPDHPVYTKNRGYVRADELTDDDELVVAI

SEQ ID NO: 399 - DNA, 306 bp, synthetic construct
  source 1..306: mol_type = other DNA
tgcctgagctacgagacagagatcctgaccgtggaatatggcctgctgccaatcggaaagatcgtggaaaagcggatcgagtgcaccgtctacagcgtggacaacaacggaaatatctatacacagcctgtggcccaatggcacgaccggggcgaacaggaggtgtttgagtactgcctggaagatggttctctgattagagccaccaaggaccacaagttcatgaccgtcgacggccagatgctgcccatcgacgaaatcttcgagcgggaactcgacctgatgagagtggataacctgcccaat

SEQ ID NO: 400 - protein, 102 aa, synthetic construct; identical to SEQ ID NO: 371

SEQ ID NO: 401 - protein, 101 aa, synthetic construct; identical to SEQ ID NO: 375

SEQ ID NO: 402 - protein, 102 aa, synthetic construct; identical to SEQ ID NO: 371

SEQ ID NO: 403 - DNA, 279 bp, synthetic construct
  source 1..279: mol_type = other DNA
acaagaagcggatactgtctggacctcaagacccaagtgcagacacctcagggcatgaaagagattagcaatatccaggtgggcgacctggtcctgagcaacaccggctacaacgaggtgctgaacgtgttccctaagtccaagaagaaatcttataagatcaccctggaagatggcaaggaaatcatctgcagcgaggaacacctgttccccacccagaccggcgagatgaacatcagcggcggactgaaggagggcatgtgcctgtacgtgaaggag

SEQ ID NO: 404 - protein, 93 aa, synthetic construct
TRSGYCLDLKTQVQTPQGMKEISNIQVGDLVLSNTGYNEVLNVFPKSKKKSYKITLEDGKEIICSEEHLFPTQTGEMNISGGLKEGMCLYVKE

SEQ ID NO: 405 - DNA, 282 bp, synthetic construct
  source 1..282: mol_type = other DNA
tctcagctgaaccggtgcctgagcctggacaccatggtggtgacaaacggcaaggccatcgagatcagagatgtgaaggtgggagattggctggaaagcgaatgtggcccagtgcaggttacagaggtgctgcctatcatcaagcagcctgtctttgagattgtgctgaaaagcggaaaaaagatccgggtgtccgctaatcacaagttccccaccaaggacggcctcaagaccatcaacagcggcctgaaggtgggcgacttcctgagaagcagagccaag

SEQ ID NO: 406 - protein, 94 aa, synthetic construct
SQLNRCLSLDTMVVTNGKAIEIRDVKVGDWLESECGPVQVTEVLPIIKQPVFEIVLKSGKKIRVSANHKFPTKDGLKTINSGLKVGDFLRSRAK

SEQ ID NO: 407 - DNA, 318 bp, synthetic construct
  source 1..318: mol_type = other DNA
ggcatcggcggaggatgttttgtgcctggcaccctggtgaacacagagaatggcctgaagaaaatcgaggaaatcaaggtgggcgacaaggtgttcagccatacaggcaagctgcaggaggtggtggacaccctgatcttcgaccgggacgaggaaatcatctctatcaacggcattgattgcaccaagaaccacgagttctacgtgatcgataaggaaaacgctaatagagtgaacgaggacaacatccacctcttcgccagatgggtccacgccgaggaactggatatgaaaaagcacctgctgatcgagctggaa

SEQ ID NO: 408 - protein, 106 aa, synthetic construct
GIGGGCFVPGTLVNTENGLKKIEEIKVGDKVFSHTGKLQEVVDTLIFDRDEEIISINGIDCTKNHEFYVIDKENANRVNEDNIHLFARWVHAEELDMKKHLLIELE

SEQ ID NO: 409 - DNA, 330 bp, synthetic construct
  source 1..330: mol_type = other DNA
ggaacaaacccatgttgcctggtgggctctagcgagattatcacaagaaactacggcaagaccaccatcaaggaagtggtcgagatcttcgacaacgacaagaatatccaggtgctggccttcaacacccacaccgataatatcgagtgggcccctatcaaggccgctcagctgaccagacctaacgccgagctggttgaactggaaatcgacaccctgcacggcgtgaaaacaatccggtgcacccctgaccaccccgtgtacaccaagaacagaggctacgtgcgggccgacgagctgacagatgatgacgagctcgtggtggctatc

SEQ ID NO: 410 - protein, 110 aa, synthetic construct
GTNPCCLVGSSEIITRNYGKTTIKEVVEIFDNDKNIQVLAFNTHTDNIEWAPIKAAQLTRPNAELVELEIDTLHGVKTIRCTPDHPVYTKNRGYVRADELTDDDELVVAI

SEQ ID NO: 411 - DNA, 105 bp, synthetic construct
  source 1..105: mol_type = other DNA
gtcaagatcatcagcagaaagagcctgggcacccagaacgtgtacgatatcggagtgggcgagccccacaactttctgctcaagaatggcctggtggccagcaac

SEQ ID NO: 412 - protein, 35 aa, synthetic construct
VKIISRKSLGTQNVYDIGVGEPHNFLLKNGLVASN

SEQ ID NO: 413 - DNA, 114 bp, synthetic construct
  source 1..114: mol_type = other DNA
atgatgctgaaaaagatcctgaagatcgaggaactggatgagagagagctgatcgacatcgaagtgtctggcaatcacctgttctacgccaacgacatcctgacccacaacagc

SEQ ID NO: 414 - protein, 38 aa, synthetic construct
MMLKKILKIEELDERELIDIEVSGNHLFYANDILTHNS

SEQ ID NO: 415 - DNA, 138 bp, synthetic construct
  source 1..138: mol_type = other DNA
atgtgcgaaatcttcgagaacgagattgattgggacgaaatcgcctctatcgagtacgtgggcgtggaagagacaatcgacatcaacgtgaccaacgacagactgtttttcgccaatggcatcctgacccacaacagc

SEQ ID NO: 416 - protein, 46 aa, synthetic construct
MCEIFENEIDWDEIASIEYVGVEETIDINVTNDRLFFANGILTHNS

SEQ ID NO: 417 - DNA, 123 bp, synthetic construct
  source 1..123: mol_type = other DNA
atgaaattcaagctgaaggaaatcaccagcatcgagacaaagcactacaagggcaaggtgcacgatctgaccgtgaaccaggaccacagctacaacgtcagaggcaccgtggtgcataattct

SEQ ID NO: 418 - protein, 41 aa, synthetic construct
MKFKLKEITSIETKHYKGKVHDLTVNQDHSYNVRGTVVHNS

SEQ ID NO: 419 - DNA, 123 bp, synthetic construct
  source 1..123: mol_type = other DNA
atggaagccaagacctacatcggcaagctgaaatctagaaagatcgtgtccaacgaggatacatacgacatccagaccagcacccacaatttcttcgccaacgacatcctggtgcacaacagc

SEQ ID NO: 420 - protein, 41 aa, synthetic construct
MEAKTYIGKLKSRKIVSNEDTYDIQTSTHNFFANDILVHNS

SEQ ID NO: 421 - DNA, 108 bp, synthetic construct
  source 1..108: mol_type = other DNA
atgatcaagatcgccacaagaaagtacctgggcaagcagaacgtgtacgacatcggcgtggagagagaccacaacttcgccctgaagaacggctttatcgcctctaat

SEQ ID NO: 422 - protein, 36 aa, synthetic construct; identical to SEQ ID NO: 373

SEQ ID NO: 423 - protein, 36 aa, synthetic construct
MVKIISRKSLGTQNVYDIGVGEPHNFLLKNGLVASN

SEQ ID NO: 424 - protein, 35 aa, synthetic construct
IKIATRKYLGKQNVYDIGVERDHNFALKNGFIASN

SEQ ID NO: 425 - DNA, 88 bp, synthetic construct
  source 1..88: mol_type = other DNA; note = SaCas9 scaffold sequence
gttttagtactctgtaatgaaaattacagaatctactaaaacaaggcaaaatgccgtgtttatctcgtcaacttgttggcgagatttt

SEQ ID NO: 426 - RNA, 100 nt, synthetic construct
  source 1..100: mol_type = other RNA
taggatggtagcacacaaccgttttagagctagaaatagcaagttaaaataaggctagtccgttatcaacttgaaaaagtggcaccgagtcggtgctttt

SEQ ID NO: 427 - RNA, 100 nt, synthetic construct
  source 1..100: mol_type = other RNA
atgtacctggtccaaggaacgttttagagctagaaatagcaagttaaaataaggctagtccgttatcaacttgaaaaagtggcaccgagtcggtgctttt

SEQ ID NO: 428 - RNA, 100 nt, synthetic construct
  source 1..100: mol_type = other RNA
ggttcataccttgaaacagggttttagagctagaaatagcaagttaaaataaggctagtccgttatcaacttgaaaaagtggcaccgagtcggtgctttt

SEQ ID NO: 429 - RNA, 100 nt, synthetic construct
  source 1..100: mol_type = other RNA
aggtcctaccttgtcaataagttttagagctagaaatagcaagttaaaataaggctagtccgttatcaacttgaaaaagtggcaccgagtcggtgctttt

SEQ ID NO: 430 - RNA, 100 nt, synthetic construct
  source 1..100: mol_type = other RNA
tttaggaacctccttatagcgttttagagctagaaatagcaagttaaaataaggctagtccgttatcaacttgaaaaagtggcaccgagtcggtgctttt

SEQ ID NO: 431 - RNA, 100 nt, synthetic construct
  source 1..100: mol_type = other RNA
gcttacttcttccggatgaagttttagagctagaaatagcaagttaaaataaggctagtccgttatcaacttgaaaaagtggcaccgagtcggtgctttt

SEQ ID NO: 432 - RNA, 100 nt, synthetic construct
  source 1..100: mol_type = other RNA
cctgcaggacggagaggagcgttttagagctagaaatagcaagttaaaataaggctagtccgttatcaacttgaaaaagtggcaccgagtcggtgctttt

SEQ ID NO: 433 - RNA, 100 nt, synthetic construct
  source 1..100: mol_type = other RNA
gcgggcatctgggcgccggggttttagagctagaaatagcaagttaaaataaggctagtccgttatcaacttgaaaaagtggcaccgagtcggtgctttt

SEQ ID NO: 434 - RNA, 100 nt, synthetic construct
  source 1..100: mol_type = other RNA
ggactcacccgcttctgcaggttttagagctagaaatagcaagttaaaataaggctagtccgttatcaacttgaaaaagtggcaccgagtcggtgctttt

SEQ ID NO: 435 - RNA, 100 nt, synthetic construct
  source 1..100: mol_type = other RNA
ctccacaggcaaagaacagagttttagagctagaaatagcaagttaaaataaggctagtccgttatcaacttgaaaaagtggcaccgagtcggtgctttt

SEQ ID NO: 436 - RNA, 100 nt, synthetic construct
  source 1..100: mol_type = other RNA
ctccaggacggccggggcttgttttagagctagaaatagcaagttaaaataaggctagtccgttatcaacttgaaaaagtggcaccgagtcggtgctttt

SEQ ID NO: 437 - RNA, 100 nt, synthetic construct
  source 1..100: mol_type = other RNA
atttaccttctggtggctccgttttagagctagaaatagcaagttaaaataaggctagtccgttatcaacttgaaaaagtggcaccgagtcggtgctttt

SEQ ID NO: 438 - RNA, 100 nt, synthetic construct
  source 1..100: mol_type = other RNA
cttacctggatccattcatggttttagagctagaaatagcaagttaaaataaggctagtccgttatcaacttgaaaaagtggcaccgagtcggtgctttt

SEQ ID NO: 439 - RNA, 100 nt, synthetic construct
  source 1..100: mol_type = other RNA
cctgcaggaggctctgtcgggttttagagctagaaatagcaagttaaaataaggctagtccgttatcaacttgaaaaagtggcaccgagtcggtgctttt

SEQ ID NO: 440 - RNA, 100 nt, synthetic construct
  source 1..100: mol_type = other RNA
tcactttagggagtctccgggttttagagctagaaatagcaagttaaaataaggctagtccgttatcaacttgaaaaagtggcaccgagtcggtgctttt

SEQ ID NO: 441 - RNA, 100 nt, synthetic construct
  source 1..100: mol_type = other RNA
cctctgcagaccccacactggttttagagctagaaatagcaagttaaaataaggctagtccgttatcaacttgaaaaagtggcaccgagtcggtgctttt

SEQ ID NO: 442 - RNA, 100 nt, synthetic construct
  source 1..100: mol_type = other RNA
cacaggtcctccccttggaggttttagagctagaaatagcaagttaaaataaggctagtccgttatcaacttgaaaaagtggcaccgagtcggtgctttt

SEQ ID NO: 443 - RNA, 100 nt, synthetic construct
  source 1..100: mol_type = other RNA
cttacctcttcatttccagggttttagagctagaaatagcaagttaaaataaggctagtccgttatcaacttgaaaaagtggcaccgagtcggtgctttt

SEQ ID NO: 444 - RNA, 100 nt, synthetic construct
  source 1..100: mol_type = other RNA
ctcacctgtgatgggcacgtgttttagagctagaaatagcaagttaaaataaggctagtccgttatcaacttgaaaaagtggcaccgagtcggtgctttt

SEQ ID NO: 445 - RNA, 100 nt, synthetic construct
  source 1..100: mol_type = other RNA
aacatacttgtcattgacgagttttagagctagaaatagcaagttaaaataaggctagtccgttatcaacttgaaaaagtggcaccgagtcggtgctttt

SEQ ID NO: 446 - RNA, 100 nt, synthetic construct
  source 1..100: mol_type = other RNA
tcccagaccagcacatcctggttttagagctagaaatagcaagttaaaataaggctagtccgttatcaacttgaaaaagtggcaccgagtcggtgctttt

SEQ ID NO: 447 - RNA, 100 nt, synthetic construct
  source 1..100: mol_type = other RNA
ccctcccagccatgggaacagttttagagctagaaatagcaagttaaaataaggctagtccgttatcaacttgaaaaagtggcaccgagtcggtgctttt

SEQ ID NO: 448 - RNA, 100 nt, synthetic construct
  source 1..100: mol_type = other RNA
actctaaaaagtgaaaatcagttttagagctagaaatagcaagttaaaataaggctagtccgttatcaacttgaaaaagtggcaccgagtcggtgctttt

SEQ ID NO: 449 - RNA, 20 nt, synthetic construct
  source 1..20: mol_type = other RNA
ctcaccagattcccgaaggt

SEQ ID NO: 450 - RNA, 20 nt, synthetic construct
  source 1..20: mol_type = other RNA
tctttagtcttctccttgca

SEQ ID NO: 451 - RNA, 20 nt, synthetic construct
  source 1..20: mol_type = other RNA
cctccttaccagcaagaggc

SEQ ID NO: 452 - RNA, 20 nt, synthetic construct
  source 1..20: mol_type = other RNA
atattacctttcgatgccgt

SEQ ID NO: 453 - RNA, 20 nt, synthetic construct
  source 1..20: mol_type = other RNA
gcccgtcatggagatggaaa

SEQ ID NO: 454 - RNA, 20 nt, synthetic construct
  source 1..20: mol_type = other RNA
ggaaacataccctgtagcag

SEQ ID NO: 455 - RNA, 20 nt, synthetic construct
  source 1..20: mol_type = other RNA
taggatggtagcacacaacc

SEQ ID NO: 456 - RNA, 20 nt, synthetic construct
  source 1..20: mol_type = other RNA
atgtacctggtccaaggaac

SEQ ID NO: 457 - RNA, 20 nt, synthetic construct
  source 1..20: mol_type = other RNA
ggttcataccttgaaacagg

SEQ ID NO: 458 - RNA, 20 nt, synthetic construct
  source 1..20: mol_type = other RNA
aggtcctaccttgtcaataa

SEQ ID NO: 459 - RNA, 20 nt, synthetic construct
  source 1..20: mol_type = other RNA
tttaggaacctccttatagc

SEQ ID NO: 460 - RNA, 20 nt, synthetic construct
  source 1..20: mol_type = other RNA
gcttacttcttccggatgaa

SEQ ID NO: 461 - RNA, 20 nt, synthetic construct
  source 1..20: mol_type = other RNA
cctgcaggacggagaggagc

SEQ ID NO: 462 - RNA, 20 nt, synthetic construct
  source 1..20: mol_type = other RNA
gcgggcatctgggcgccggg

SEQ ID NO: 463 - RNA, 20 nt, synthetic construct
  source 1..20: mol_type = other RNA
ggactcacccgcttctgcag

SEQ ID NO: 464 - RNA, 20 nt, synthetic construct
  source 1..20: mol_type = other RNA
ctccacaggcaaagaacaga

SEQ ID NO: 465 - RNA, 20 nt, synthetic construct
  source 1..20: mol_type = other RNA
ctccaggacggccggggctt

SEQ ID NO: 466 - RNA, 20 nt, synthetic construct
  source 1..20: mol_type = other RNA
atttaccttctggtggctcc

SEQ ID NO: 467 - RNA, 20 nt, synthetic construct
  source 1..20: mol_type = other RNA
cttacctggatccattcatg

SEQ ID NO: 468 - RNA, 20 nt, synthetic construct
  source 1..20: mol_type = other RNA
cctgcaggaggctctgtcgg

SEQ ID NO: 469 - RNA, 20 nt, synthetic construct
  source 1..20: mol_type = other RNA
tcactttagggagtctccgg

SEQ ID NO: 470 - RNA, 20 nt, synthetic construct
  source 1..20: mol_type = other RNA
cctctgcagaccccacactg

SEQ ID NO: 471 - RNA, 20 nt, synthetic construct
  source 1..20: mol_type = other RNA
cacaggtcctccccttggag

SEQ ID NO: 472 - RNA, 20 nt, synthetic construct
  source 1..20: mol_type = other RNA
cttacctcttcatttccagg

SEQ ID NO: 473 - RNA, 20 nt, synthetic construct
  source 1..20: mol_type = other RNA
ctcacctgtgatgggcacgt

SEQ ID NO: 474 - RNA, 20 nt, synthetic construct
  source 1..20: mol_type = other RNA
aacatacttgtcattgacga

SEQ ID NO: 475 - RNA, 20 nt, synthetic construct
  source 1..20: mol_type = other RNA
tcccagaccagcacatcctg

SEQ ID NO: 476 - RNA, 20 nt, synthetic construct
  source 1..20: mol_type = other RNA
ccctcccagccatgggaaca

SEQ ID NO: 477 - RNA, 20 nt, synthetic construct
  source 1..20: mol_type = other RNA
actctaaaaagtgaaaatca

SEQ ID NO: 478 - RNA, 20 nt, synthetic construct
  source 1..20: mol_type = other RNA
cttaccgatgttcccttcga

SEQ ID NO: 479 - RNA, 20 nt, synthetic construct
  source 1..20: mol_type = other RNA
cttacttcagtgtcctatgc

SEQ ID NO: 480 - RNA, 20 nt, synthetic construct
  source 1..20: mol_type = other RNA
cccaggcctaccctctgaag

SEQ ID NO: 481 - RNA, 20 nt, synthetic construct
  source 1..20: mol_type = other RNA
caccctagactccaccaaaa

SEQ ID NO: 482 - RNA, 20 nt, synthetic construct
  source 1..20: mol_type = other RNA
attataggccattgggtacg

SEQ ID NO: 483 - RNA, 20 nt, synthetic construct
  source 1..20: mol_type = other RNA
tcctagactctgaaggacga

SEQ ID NO: 484 - RNA, 20 nt, synthetic construct
  source 1..20: mol_type = other RNA
ccaaggtccaatcacatgtg

SEQ ID NO: 485 - RNA, 20 nt, synthetic construct
  source 1..20: mol_type = other RNA
ggctaggagtcagcgacata

SEQ ID NO: 486 - RNA, 20 nt, synthetic construct
  source 1..20: mol_type = other RNA
acttacctcgcggacattcc

SEQ ID NO: 487 - RNA, 20 nt, synthetic construct
  source 1..20: mol_type = other RNA
tcccccagccaacctttgta

SEQ ID NO: 488 - RNA, 20 nt, synthetic construct
  source 1..20: mol_type = other RNA
tgcttaccccaccccagttg

SEQ ID NO: 489 - RNA, 20 nt, synthetic construct
  source 1..20: mol_type = other RNA
aatcacctctgaacaatccc

SEQ ID NO: 490 - RNA, 20 nt, synthetic construct
  source 1..20: mol_type = other RNA
gaggcttacctcttcactgt

SEQ ID NO: 491 - RNA, 20 nt, synthetic construct
  source 1..20: mol_type = other RNA
tttggacagatctattccag

SEQ ID NO: 492 - RNA, 20 nt, synthetic construct
  source 1..20: mol_type = other RNA
acctcaccttctgtttgtcg

SEQ ID NO: 493 - RNA, 20 nt, synthetic construct
  source 1..20: mol_type = other RNA
cccacagaacacagcccact

SEQ ID NO: 494 - RNA, 20 nt, synthetic construct
  source 1..20: mol_type = other RNA
tgcccacaggtgacagactt

SEQ ID NO: 495 - RNA, 20 nt, synthetic construct
  source 1..20: mol_type = other RNA
agccctcacctctcactagt

SEQ ID NO: 496 - RNA, 20 nt, synthetic construct
  source 1..20: mol_type = other RNA
cccagccgtactatgccacg

SEQ ID NO: 497 - RNA, 20 nt, synthetic construct
  source 1..20: mol_type = other RNA
atctcagagtttgcagaagc

SEQ ID NO: 498 - RNA, 20 nt, synthetic construct
  source 1..20: mol_type = other RNA
actgctgaccttgatgtagt

SEQ ID NO: 499 - RNA, 20 nt, synthetic construct
  source 1..20: mol_type = other RNA
tgcgtccagaaccagctgct

SEQ ID NO: 500 - RNA, 20 nt, synthetic construct
  source 1..20: mol_type = other RNA
ctcacctgtcaagagcggcg

SEQ ID NO: 501 - RNA, 20 nt, synthetic construct
  source 1..20: mol_type = other RNA
tctttagtccgaggatcaga

SEQ ID NO: 502 - RNA, 20 nt, synthetic construct
  source 1..20: mol_type = other RNA
gcaattaccttgtatggttg

SEQ ID NO: 503 - RNA, 20 nt, synthetic construct
  source 1..20: mol_type = other RNA
tgttatagctactgctgtgt

SEQ ID NO: 504 - RNA, 20 nt, synthetic construct
  source 1..20: mol_type = other RNA
tttacttaccaatttggaat

SEQ ID NO: 505 - RNA, 20 nt, synthetic construct
  source 1..20: mol_type = other RNA
cagcatgaaggcgctgagcc

SEQ ID NO: 506 - RNA, 20 nt, synthetic construct
  source 1..20: mol_type = other RNA
ggcttacctggatgggaagg

SEQ ID NO: 507 - RNA, 20 nt, synthetic construct
  source 1..20: mol_type = other RNA
tcagtttaccattcggaagc

SEQ ID NO: 508 - RNA, 20 nt, synthetic construct
  source 1..20: mol_type = other RNA
acttaccagaatgggtcctg

SEQ ID NO: 509 - RNA, 20 nt, synthetic construct
  source 1..20: mol_type = other RNA
tgcttacccacaaacttttg

SEQ ID NO: 510-516 - skipped (7 entries)

SEQ ID NO: 517 - RNA, 20 nt, synthetic construct
  source 1..20: mol_type = other RNA
gcaccatggcctcggctcgg

SEQ ID NO: 518 - RNA, 20 nt, synthetic construct
  source 1..20: mol_type = other RNA
ctcactgggtgtctggtctg

SEQ ID NO: 519 - RNA, 20 nt, synthetic construct
  source 1..20: mol_type = other RNA
cttacctcttgggacaggaa

SEQ ID NO: 520 - RNA, 20 nt, synthetic construct
  source 1..20: mol_type = other RNA
tgcaggcagagattgtcaag

SEQ ID NO: 521 - RNA, 20 nt, synthetic construct
  source 1..20: mol_type = other RNA
tttatagcaccagcaacaag

SEQ ID NO: 522 - RNA, 20 nt, synthetic construct
  source 1..20: mol_type = other RNA
cccaatacctttaatgatcc

SEQ ID NO: 523 - RNA, 20 nt, synthetic construct
  source 1..20: mol_type = other RNA
cctcaccctcatagcagtcg

SEQ ID NO: 524 - RNA, 20 nt, synthetic construct
  source 1..20: mol_type = other RNA
tccaggtccagctgtatgta

SEQ ID NO: 525 - RNA, 20 nt, synthetic construct
  source 1..20: mol_type = other RNA
cttactcaaagtccccatcc

SEQ ID NO: 526 - RNA, 20 nt, synthetic construct
  source 1..20: mol_type = other RNA
actcacccagcatccccagc

SEQ ID NO: 527 - RNA, 20 nt, synthetic construct
  source 1..20: mol_type = other RNA
gcttacagatcttgccccgc

SEQ ID NO: 528 - RNA, 20 nt, synthetic construct
  source 1..20: mol_type = other RNA
atttacctgaacctctgaat

SEQ ID NO: 529 - RNA, 20 nt, synthetic construct
  source 1..20: mol_type = other RNA
cttagcatcaaggcatgcca

SEQ ID NO: 530 - RNA, 20 nt, synthetic construct
  source 1..20: mol_type = other RNA
cttactgtacaacaagctgc

SEQ ID NO: 531 - RNA, 20 nt, synthetic construct
  source 1..20: mol_type = other RNA
cccttaccaggcttgatgag

SEQ ID NO: 532 - RNA, 20 nt, synthetic construct
  source 1..20: mol_type = other RNA
ctcagacaaggacacgttga

SEQ ID NO: 533 - RNA, 20 nt, synthetic construct
  source 1..20: mol_type = other RNA
caacaggaaggctgacgagg

SEQ ID NO: 534 - RNA, 20 nt, synthetic construct
  source 1..20: mol_type = other RNA
cccagtgaagacagcatcat

SEQ ID NO: 535 - RNA, 20 nt, synthetic construct
  source 1..20: mol_type = other RNA
cccaggacttcctgctgctg

SEQ ID NO: 536 - RNA, 20 nt, synthetic construct
  source 1..20: mol_type = other RNA
tgtgttaccttgatgaccgg

SEQ ID NO: 537 - RNA, 20 nt, synthetic construct
  source 1..20: mol_type = other RNA
gttcatagctgggctcctgg

SEQ ID NO: 538 - RNA, 20 nt, synthetic construct
  source 1..20: mol_type = other RNA
cctacccacctcctttctca

SEQ ID NO: 539 - RNA, 20 nt, synthetic construct
  source 1..20: mol_type = other RNA
actcacgtgagcaccgggat

SEQ ID NO: 540 - RNA, 20 nt, synthetic construct
  source 1..20: mol_type = other RNA
gactcacgtgagcaccggga

SEQ ID NO: 541 - RNA, 20 nt, synthetic construct
  source 1..20: mol_type = other RNA
ggactcactgagacaaagta

SEQ ID NO: 542 - RNA, 20 nt, synthetic construct
  source 1..20: mol_type = other RNA
gactcactgagacaaagtag

SEQ ID NO: 543 - RNA, 20 nt, synthetic construct
  source 1..20: mol_type = other RNA
ctcttccagccagctgaggt

SEQ ID NO: 544 - RNA, 20 nt, synthetic construct
  source 1..20: mol_type = other RNA
gaactcactcttgtcagtct

SEQ ID NO: 545 - RNA, 20 nt, synthetic construct
  source 1..20: mol_type = other RNA
tccagcgctagtcctgctga

SEQ ID NO: 546 - RNA, 20 nt, synthetic construct
  source 1..20: mol_type = other RNA
gaggcatggctgaaatcttc

SEQ ID NO: 547 - RNA, 20 nt, synthetic construct
  source 1..20: mol_type = other RNA
gactctacctgtttgccagg

SEQ ID NO: 548 - RNA, 20 nt, synthetic construct
  source 1..20: mol_type = other RNA
acttaccaggtgcagggtgt

SEQ ID NO: 549 - RNA, 20 nt, synthetic construct
  source 1..20: mol_type = other RNA
gctgtgtacctgaggggtcc

SEQ ID NO: 550 - RNA, 20 nt, synthetic construct
  source 1..20: mol_type = other RNA
tttgtagccatccagtccaa

SEQ ID NO: 551 - RNA, 20 nt, synthetic construct
  source 1..20: mol_type = other RNA
ttcctacagattcctcctta

SEQ ID NO: 552 - RNA, 20 nt, synthetic construct
  source 1..20: mol_type = other RNA
atactcacaggcaagctgga

SEQ ID NO: 553 - protein, 119 aa, Homo sapiens
MSRSVALAVLALLSLSGLEAIQRTPKIQVYSRHPAENGKSNFLNCYVSGFHPSDIEVDLLKNGERIEKVEHSDLSFSKDWSFYLLYYTEFTPTEKDEYACRVNHVTLSQPKIVKWDRDM

SEQ ID NO: 554 - DNA, 9199 bp, Homo sapiens
  source 1..9199: mol_type = genomic DNA
catgtcataaatggtaagtccaagaaaaatacaggtattcccccccaaagaaaactgtaaaatcgacttttttctatctgtactgttttttattggtttttaaattggttttccaagtgagtaaatcagaatctatctgtaatggattttaaatttagtgtttctctgtgatgtagtaaacaagaaactagaggcaaaaatagccctgtcccttgctaaacttctaaggcacttttctagtacaactcaacactaacatttcaggcctttagtgccttatatgagtttttaaaagggggaaaagggagggagcaagagtgtcttaactcatacatttaggcataacaattattctcatattttagttattgagagggctggtagaaaaactaggtaaataatattaataattatagcgcttattaaacactacagaacacttactatgtaccaggcattgtgggaggctctctcttgtgcattatctcatttcattaggtccatggagagtattgcattttcttagtttaggcatggcctccacaataaagattatcaaaagcctaaaaatatgtaaaagaaacctagaagttatttgttgtgctccttggggaagctaggcaaatcctttcaactgaaaaccatggtgacttccaagatctctgcccctccccatcgccatggtccacttcctcttctcactgttcctcttagaaaagatctgtggactccaccaccacgaaatggcggcaccttatttatggtcactttagagggtaggttttcttaatgggtctgcctgtcatgtttaacgtccttggctgggtccaaggcagatgcagtccaaactctcactaaaattgccgagccctttgtcttccagtgtctaaaatattaatgtcaatggaatcaggccagagtttgaattctagtctcttagcctttgtttcccctgtccataaaatgaatgggggtaattctttcctcctacagtttatttatatattcactaattcattcattcatccatccattcgttcattcggtttactgagtacctactatgtgccagcccctgttctagggtggaaactaagagaatgatgtacctagagggcgctggaagctctaaagccctagcagttactgcttttactattagtggtcgtttttttctcccccccgccccccgacaaatcaacagaacaaagaaaattacctaaacagcaaggacatagggaggaacttcttggcacagaactttccaaacactttttcctgaagggatacaagaagcaagaaaggtactctttcactaggaccttctctgagctgtcctcaggatgcttttgggactatttttcttacccagagaatggagaaaccctgcagggaattcccaagctgtagttataaacagaagttctccttctgctaggtagcattcaaagatcttaatcttctgggtttccgttttctcgaatgaaaaatgcaggtccgagcagttaactggctggggcaccattagcaagtcacttagcatctctggggccagtctgcaaagcgagggggcagccttaatgtgcctccagcctgaagtcctagaatgagcgcccggtgtcccaagctggggcgcgcaccccagatcggagggcgccgatgtacagacagcaaactcacccagtctagtgcatgccttcttaaacatcacgagactctaagaaaaggaaactgaaaacgggaaagtccctctctctaacctggcactgcgtcgctggcttggagacaggtgacggtccctgcgggccttgtcctgattggctgggcacgcgtttaatataagtggaggcgtcgcgctggcgggcattcctgaagctgacagcattcgggccgagatgtctcgctccgtggccttagctgtgctcgcgctactctctctttctggcctggaggctatccagcgtgagtctctcctaccctcccgctctggtccttcctctcccgctctgcaccctctgtggccctcgctgtgctctctcgctccgtgacttcccttctccaagttctccttggtggcccgccgtggggctagtccagggctggatctcggggaagcggcggggtggcctgggagtggggaagggggtgcgcacccgggacgcgcgctacttgcccctttcggcggggagcaggggagacctttggcctacggcgacgggagggtcgggacaaagtttagggcgtcgataagcgtcagagcgccgaggttgggggagggtttctcttccgctctttcgcggggcctctggctcccccagcgcagctggagtgggggacgggtaggctcgtcccaaaggcgcggcgctgaggtttgtgaacgcgtggaggggcgcttggggtctgggggaggcgtcgcccgggtaagcctgtctgctgcggctctgcttcccttagactggagagctgtggacttcgtctaggcgcccgctaagttcgcatgtcctagcacctctgggtctatgtggggccacaccgtggggaggaaacagcacgcgacgtttgtagaatgcttggctgtgatacaaagcggtttcgaataattaacttatttgttcccatcacatgtcacttttaaaaaattataagaactacccgttattgacatctttctgtgtgccaaggactttatgtgctttgcgtcatttaattttgaaaacagttatcttccgccatagataactactatggttatcttctgcctctcacagatgaagaaactaaggcaccgagattttaagaaacttaattacacaggggataaatggcagcaatcgagattgaagtcaagcctaaccagggcttttgcgggagcgcatgccttttggctgtaattcgtgcatttttttttaagaaaaacgcctgccttctgcgtgagattctccagagcaaactgggcggcatgggccctgtggtcttttcgtacagagggcttcctctttggctctttgcctggttgtttccaagatgtactgtgcctcttactttcggttttgaaaacatgagggggttgggcgtggtagcttacgcctgtaatcccagcacttagggaggccgaggcgggaggatggcttgaggtccgtagttgagaccagcctggccaacatggtgaagcctggtctctacaaaaaataataacaaaaattagccgggtgtggtggctcgtgcctgtggtcccagctgctccggtggctgaggcgggaggatctcttgagcttaggcttttgagctatcatggcgccagtgcactccagcgtgggcaacagagcgagaccctgtctctcaaaaaagaaaaaaaaaaaaaaagaaagagaaaagaaaagaaagaaagaagtgaaggtttgtcagtcaggggagctgtaaaaccattaataaagataatccaagatggttaccaagactgttgaggacgccagagatcttgagcactttctaagtacctggcaatacactaagcgcgctcaccttttcctctggcaaaacatgatcgaaagcagaatgttttgatcatgagaaaattgcatttaatttgaatacaatttatttacaacataaaggataatgtatatatcaccaccattactggtatttgctggttatgttagatgtcattttaaaaaataacaatctgatatttaaaaaaaaatcttattttgaaaatttccaaagtaatacatgccatgcatagaccatttctggaagataccacaagaaacatgtaatgatgattgcctctgaaggtctattttcctcctctgacctgtgtgtgggttttgtttttgttttactgtgggcataaattaatttttcagttaagttttggaagcttaaataactctccaaaagtcataaagccagtaactggttgagcccaaattcaaacccagcctgtctgatacttgtcctcttcttagaaaagattacagtgatgctctcacaaaatcttgccgccttccctcaaacagagagttccaggcaggatgaatctgtgctctgatccctgaggcatttaatatgttcttattattagaagctcagatgcaaagagctctcttagcttttaatgttatgaaaaaaatcaggtcttcattagattccccaatccacctcttgatggggctagtagcctttccttaatgatagggtgtttctagagagatatatctggtcaaggtggcctggtactcctccttctccccacagcctcccagacaaggaggagtagctgccttttagtgatcatgtaccctgaatataagtgtatttaaaagaattttatacacatatatttagtgtcaatctgtatatttagtagcactaacacttctcttcattttcaatgaaaaatatagagtttataatattttcttcccacttccccatggatggtctagtcatgcctctcattttggaaagtactgtttctgaaacattaggcaatatattcccaacctggctagtttacagcaatcacctgtggatgctaattaaaacgcaaatcccactgtcacatgcattactccatttgatcataatggaaagtatgttctgtcccatttgccatagtcctcacctatccctgttgtattttatcgggtccaactcaaccatttaaggtatttgccagctcttgtatgcatttaggttttgtttctttgttttttagctcatgaaattaggtacaaagtcagagaggggtctggcatataaaacctcagcagaaataaagaggttttgttgtttggtaagaacataccttgggttggttgggcacggtggctcgtgcctgtaatcccaacactttgggaggccaaggcaggctgatcacttgaagttgggagttcaagaccagcctggccaacatggtgaaatcccgtctctactgaaaatacaaaaattaaccaggcatggtggtgtgtgcctgtagtcccaggaatcacttgaacccaggaggcggaggttgcagtgagctgagatctcaccactgcacactgcactccagcctgggcaatggaatgagattccatcccaaaaaataaaaaaataaaaaaataaagaacataccttgggttgatccacttaggaacctcagataataacatctgccacgtatagagcaattgctatgtcccaggcactctactagacacttcatacagtttagaaaatcagatgggtgtagatcaaggcaggagcaggaaccaaaaagaaaggcataaacataagaaaaaaaatggaaggggtggaaacagagtacaataacatgagtaatttgatgggggctattatgaactgagaaatgaactttgaaaagtatcttggggccaaatcatgtagactcttgagtgatgtgttaaggaatgctatgagtgctgagagggcatcagaagtccttgagagcctccagagaaaggctcttaaaaatgcagcgcaatctccagtgacagaagatactgctagaaatctgctagaaaaaaaacaaaaaaggcatgtatagaggaattatgagggaaagataccaagtcacggtttattcttcaaaatggaggtggcttgttgggaaggtggaagctcatttggccagagtggaaatggaattgggagaaatcgatgaccaaatgtaaacacttggtgcctgatatagcttgacaccaagttagccccaagtgaaataccctggcaatattaatgtgtcttttcccgatattcctcaggtactccaaagattcaggtttactcacgtcatccagcagagaatggaaagtcaaatttcctgaattgctatgtgtctgggtttcatccatccgacattgaagttgacttactgaagaatggagagagaattgaaaaagtggagcattcagacttgtctttcagcaaggactggtctttctatctcttgtactacactgaattcacccccactgaaaaagatgagtatgcctgccgtgtgaaccatgtgactttgtcacagcccaagatagttaagtggggtaagtcttacattcttttgtaagctgctgaaagttgtgtatgagtagtcatatcataaagctgctttgatataaaaaaggtctatggccatactaccctgaatgagtcccatcccatctgatataaacaatctgcatattgggattgtcagggaatgttcttaaagatcagattagtggcacctgctgagatactgatgcacagcatggtttctgaaccagtagtttccctgcagttgagcagggagcagcagcagcacttgcacaaatacatatacactcttaacacttcttacctactggcttcctctagcttttgtggcagcttcaggtatatttagcactgaacgaacatctcaagaaggtataggcctttgtttgtaagtcctgctgtcctagcatcctataatcctggacttctccagtactttctggctggattggtatctgaggctagtaggaagggcttgttcctgctgggtagctctaaacaatgtattcatgggtaggaacagcagcctattctgccagccttatttctaaccattttagacatttgttagtacatggtattttaaaagtaaaacttaatgtcttccttttttttctccactgtctttttcatagatcgagacatgtaagcagcatcatggaggtaagtttttgaccttgagaaaatgtttttgtttcactgtcctgaggactatttatagacagctctaacatgataaccctcactatgtggagaacattgacagagtaacattttagcagggaaagaagaatcctacagggtcatgttcccttctcctgtggagtggcatgaagaaggtgtatggccccaggtatggccatattactgaccctctacagagagggcaaaggaactgccagtatggtattgcaggataaaggcaggtggttacccacattacctgcaaggctttgatctttcttctgccatttccacattggacatctctgctgaggagagaaaatgaaccactcttttcctttgtataatgttgttttattcttcagacagaagagaggagttatacagctctgcagacatcccattcctgtatggggactgtgtttgcctcttagaggttcccaggccactagaggagataaagggaaacagattgttataacttgatataatgatactataatagatgtaactacaaggagctccagaagcaagagagagggaggaacttggacttctctgcatctttagttggagtccaaaggcttttcaatgaaattctactgcccagggtacattgatgctgaaaccccattcaaatctcctgttatattctagaacagggaattgatttgggagagcatcaggaaggtggatgatctgcccagtcacactgttagtaaattgtagagccaggacctgaactctaatatagtcatgtgttacttaatgacggggacatgttctgagaaatgcttacacaaacctaggtgttgtagcctactacacgcataggctacatggtatagcctattgctcctagactacaaacctgtacagcctgttactgtactgaatactgtgggcagttgtaacacaatggtaagtatttgtgtatctaaacatagaagttgcagtaaaaatatgctattttaatcttatgagaccactgtcatatatacagtccatcattgaccaaaacatcatatcagcattttttcttctaagattttgggagcaccaaagggatacactaacaggatatactctttataatgggtttggagaactgtctgcagctacttcttttaaaaaggtgatctacacagtagaaattagacaagtttggtaatgagatctgcaatccaaataaaataaattcattgctaacctttttcttttcttttcaggtttgaagatgccgcatttggattggatgaattccaaattctgcttgcttgctttttaatattgatatgcttatacacttacactttatgcacaaaatgtagggttataataatgttaacatggacatgatcttctttataattctactttgagtgctgtctccatgtttgatgtatctgagcaggttgctccacaggtagctctaggagggctggcaacttagaggtggggagcagagaattctcttatccaacatcaacatcttggtcagatttgaactcttcaatctcttgcactcaaagcttgttaagatagttaagcgtgcataagttaacttccaatttacatactctgcttagaatttgggggaaaatttagaaatataattgacaggattattggaaatttgttataatgaatgaaacattttgtcatataagattcatatttacttcttatacatttgataaagtaaggcatggttgtggttaatctggtttatttttgttccacaagttaaataaatcataaaacttgatgtgttatctcttatatctcactcccactattacccctttattttcaaacagggaaacagtcttcaagttccacttggtaaaaaatgtgaaccccttgtatatagagtttggctcacagtgtaaagggcctcagtgattcacattttccagattaggaatctgatgctcaaagaagttaaatggcatagttggggtgacacagctgtctagtgggaggccagccttctatattttagccagcgttctttcctgcgggccaggtcatgaggagtatgcagactctaagagggagcaaaagtatctgaaggatttaatattttagcaaggaatagatatacaatcatcccttggtctccctgggggattggtttcaggaccccttcttggacaccaaatctatggatatttaagtcccttctataaaatggtatagtatttgcatataacctatccacatcctcctgtatactttaaatcatttctagattacttgtaatacctaatacaatgtaaatgctatgcaaatagttgttattgtttaaggaataatgacaagaaaaaaaagtctgtacatgctcagtaaagacacaaccatccctttttttccccagtgtttttgatccatggtttgctgaatccacagatgtggagcccctggatacggaaggcccgctgtactttgaatgacaaataacagatttaaa

SEQ ID NO: 555 - DNA, 8694 bp, Homo sapiens
  source 1..8694: mol_type = genomic DNA
tacctagagggcgctggaagctctaaagccctagcagttactgcttttactattagtggtcgtttttttctcccccccgccccccgacaaatcaacagaacaaagaaaattacctaaacagcaaggacatagggaggaacttcttggcacagaactttccaaacactttttcctgaagggatacaagaagcaagaaaggtactctttcactaggaccttctctgagctgtcctcaggatgcttttgggactatttttcttacccagagaatggagaaaccctgcagggaattcccaagctgtagttataaacagaagttctccttctgctaggtagcattcaaagatcttaatcttctgggtttccgttttctcgaatgaaaaatgcaggtccgagcagttaactggctggggcaccattagcaagtcacttagcatctctggggccagtctgcaaagcgagggggcagccttaatgtgcctccagcctgaagtcctagaatgagcgcccggtgtcccaagctggggcgcgcaccccagatcggagggcgccgatgtacagacagcaaactcacccagtctagtgcatgccttcttaaacatcacgagactctaagaaaaggaaactgaaaacgggaaagtccctctctctaacctggcactgcgtcgctggcttggagacaggtgacggtccctgcgggccttgtcctgattggctgggcacgcgtttaatataagtggaggcgtcgcgctggcgggcattcctgaagctgacagcattcgggccgagatgtctcgctccgtggccttagctgtgctcgcgctactctctctttctggcctggaggctatccagcgtgagtctctcctaccctcccgctctggtccttcctctcccgctctgcaccctctgtggccctcgctgtgctctctcgctccgtgacttcccttctccaagttctccttggtggcccgccgtggggctagtccagggctggatctcggggaagcggcggggtggcctgggagtggggaagggggtgcgcacccgggacgcgcgctacttgcccctttcggcggggagcaggggagacctttggcctacggcgacgggagggtcgggacaaagtttagggcgtcgataagcgtcagagcgccgaggttgggggagggtttctcttccgctctttcgcggggcctctggctcccccagcgcagctggagtgggggacgggtaggctcgtcccaaaggcgcggcgctgaggtttgtgaacgcgtggaggggcgcttggggtctgggggaggcgtcgcccgggtaagcctgtctgctgcggctctgcttcccttagactggagagctgtggacttcgtctaggcgcccgctaagttcgcatgtcctagcacctctgggtctatgtggggccacaccgtggggaggaaacagcacgcgacgtttgtagaatgcttggctgtgatacaaagcggtttcgaataattaacttatttgttcccatcacatgtcacttttaaaaaattataagaactacccgttattgacatctttctgtgtgccaaggactttatgtgctttgcgtcatttaattttgaaaacagttatcttccgccatagataactactatggttatcttctgcctctcacagatgaagaaactaaggcaccgagattttaagaaacttaattacacaggggataaatggcagcaatcgagattgaagtcaagcctaaccagggcttttgcgggagcgcatgccttttggctgtaattcgtgcatttttttttaagaaaaacgcctgccttctgcgtgagattctccagagcaaactgggcggcatgggccctgtggtcttttcgtacagagggcttcctctttggctctttgcctggttgtttccaagatgtactgtgcctcttactttcggttttgaaaacatgagggggttgggcgtggtagcttacgcctgtaatcccagcacttagggaggccgaggcgggaggatggcttgaggtccgtagttgagaccagcctggccaacatggtgaagcctggtctctacaaaaaataataacaaaaattagccgggtgtggtggctcgtgcctgtggtcccagctgctccggtggctgaggcgggaggatctcttgagcttaggcttttgagctatcatggcgccagtgcactccagcgtgggcaacagagcgagaccctgtctctcaaaaaagaaaaaaaaaaaaaaagaaagagaaaagaaaagaaagaaagaagtgaaggtttgtcagtcaggggagctgtaaaaccattaataaagataatccaagatggttaccaagactgttgaggacgccagagatcttgagcactttctaagtacctggcaatacactaagcgcgctcaccttttcctctggcaaaacatgatcgaaagcagaatgttttgatcatgagaaaattgcatttaatttgaatacaatttatttacaacataaaggataatgtatatatcaccaccattactggtatttgctggttatgttagatgtcattttaaaaaataacaatctgatatttaaaaaaaaatcttattttgaaaatttccaaagtaatacatgccatgcatagaccatttctggaagataccacaagaaacatgtaatgatgattgcctctgaaggtctattttcctcctctgacctgtgtgtgggttttgtttttgttttactgtgggcataaattaatttttcagttaagttttggaagcttaaataactctccaaaagtcataaagccagtaactggttgagcccaaattcaaacccagcctgtctgatacttgtcctcttcttagaaaagattacagtgatgctctcacaaaatcttgccgccttccctcaaacagagagttccaggcaggatgaatctgtgctctgatccctgaggcatttaatatgttcttattattagaagctcagatgcaaagagctctcttagcttttaatgttatgaaaaaaatcaggtcttcattagattccccaatccacctcttgatggggctagtagcctttccttaatgatagggtgtttctagagagatatatctggtcaaggtggcctggtactcctccttctccccacagcctcccagacaaggaggagtagctgccttttagtgatcatgtaccctgaatataagtgtatttaaaagaattttatacacatatatttagtgtcaatctgtatatttagtagcactaacacttctcttcattttcaatgaaaaatatagagtttataatattttcttcccacttccccatggatggtctagtcatgcctctcattttggaaagtactgtttctgaaacattaggcaatatattcccaacctggctagtttacagcaatcacctgtggatgctaattaaaacgcaaatcccactgtcacatgcattactccatttgatcataatggaaagtatgttctgtcccatttgccatagtcctcacctatccctgttgtattttatcgggtccaactcaaccatttaaggtatttgccagctcttgtatgcatttaggttttgtttctttgttttttagctcatgaaattaggtacaaagtcagagaggggtctggcatataaaacctcagcagaaataaagaggttttgttgtttggtaagaacataccttgggttggttgggcacggtggctcgtgcctgtaatcccaacactttgggaggccaaggcaggctgatcacttgaagttgggagttcaagaccagcctggccaacatggtgaaatcccgtctctactgaaaatacaaaaattaaccaggcatggtggtgtgtgcctgtagtcccaggaatcacttgaacccaggaggcggaggttgcagtgagctgagatctcaccactgcacactgcactccagcctgggcaatggaatgagattccatcccaaaaaataaaaaaataaaaaaataaagaacataccttgggttgatccacttaggaacctcagataataacatctgccacgtatagagcaattgctatgtcccaggcactctactagacacttcatacagtttagaaaatcagatgggtgtagatcaaggcaggagcaggaaccaaaaagaaaggcataaacataagaaaaaaaatggaaggggtggaaacagagtacaataacatgagtaatttgatgggggctattatgaactgagaaatgaactttgaaaagtatcttggggccaaatcatgtagactcttgagtgatgtgttaaggaatgctatgagtgctgagagggcatcagaagtccttgagagcctccagagaaaggctcttaaaaatgcagcgcaatctccagtgacagaagatactgctagaaatctgctagaaaaaaaacaaaaaaggcatgtatagaggaattatgagggaaagataccaagtcacggtttattcttcaaaatggaggtggcttgttgggaaggtggaagctcatttggccagagtggaaatggaattgggagaaatcgatgaccaaatgtaaacacttggtgcctgatatagcttgacaccaagttagccccaagtgaaataccctggcaatattaatgtgtcttttcccgatattcctcaggtactccaaagattcaggtttactcacgtcatccagcagagaatggaaagtcaaatttcctgaattgctatgtgtctgggtttcatccatccgacattgaagttgacttactgaagaatggagagagaattgaaaaagtggagcattcagacttgtctttcagcaaggactggtctttctatctcttgtactacactgaattcacccccactgaaaaagatgagtatgcctgccgtgtgaaccatgtgactttgtcacagcccaagatagttaagtggggtaagtcttacattcttttgtaagctgctgaaagttgtgtatgagtagtcatatcataaagctgctttgatataaaaaaggtctatggccatactaccctgaatgagtcccatcccatctgatataaacaatctgcatattgggattgtcagggaatgttcttaaagatcagattagtggcacctgctgagatactgatgcacagcatggtttctgaaccagtagtttccctgcagttgagcagggagcagcagcagcacttgcacaaatacatatacactcttaacacttcttacctactggcttcctctagcttttgtggcagcttcaggtatatttagcactgaacgaacatctcaagaaggtataggcctttgtttgtaagtcctgctgtcctagcatcctataatcctggacttctccagtactttctggctggattggtatctgaggctagtaggaagggcttgttcctgctgggtagctctaaacaatgtattcatgggtaggaacagcagcctattctgccagccttatttctaaccattttagacatttgttagtacatggtattttaaaagtaaaacttaatgtcttccttttttttctccactgtctttttcatagatcgagacatgtaagcagcatcatggaggtaagtttttgaccttgagaaaatgtttttgtttcactgtcctgaggactatttatagacagctctaacatgataaccctcactatgtggagaacattgacagagtaacattttagcagggaaagaagaatcctacagggtcatgttcccttctcctgtggagtggcatgaagaaggtgtatggccccaggtatggccatattactgaccctctacagagagggcaaaggaactgccagtatggtattgcaggataaaggcaggtggttacccacattacctgcaaggctttgatctttcttctgccatttccacattggacatctctgctgaggagagaaaatgaaccactcttttcctttgtataatgttgttttattcttcagacagaagagaggagttatacagctctgcagacatcccattcctgtatggggactgtgtttgcctcttagaggttcccaggccactagaggagataaagggaaacagattgttataacttgatataatgatactataatagatgtaactacaaggagctccagaagcaagagagagggaggaacttggacttctctgcatctttagttggagtccaaaggcttttcaatgaaattctactgcccagggtacattgatgctgaaaccccattcaaatctcctgttatattctagaacagggaattgatttgggagagcatcaggaaggtggatgatctgcccagtcacactgttagtaaattgtagagccaggacctgaactctaatatagtcatgtgttacttaatgacggggacatgttctgagaaatgcttacacaaacctaggtgttgtagcctactacacgcataggctacatggtatagcctattgctcctagactacaaacctgtacagcctgttactgtactgaatactgtgggcagttgtaacacaatggtaagtatttgtgtatctaaacatagaagttgcagtaaaaatatgctattttaatcttatgagaccactgtcatatatacagtccatcattgaccaaaacatcatatcagcattttttcttctaagattttgggagcaccaaagggatacactaacaggatatactctttataatgggtttggagaactgtctgcagctacttcttttaaaaaggtgatctacacagtagaaattagacaagtttggtaatgagatctgcaatccaaataaaataaattcattgctaacctttttcttttcttttcaggtttgaagatgccgcatttggattggatgaattccaaattctgcttgcttgctttttaatattgatatgcttatacacttacactttatgcacaaaatgtagggttataataatgttaacatggacatgatcttctttataattctactttgagtgctgtctccatgtttgatgtatctgagcaggttgctccacaggtagctctaggagggctggcaacttagaggtggggagcagagaattctcttatccaacatcaacatcttggtcagatttgaactcttcaatctcttgcactcaaagcttgttaagatagttaagcgtgcataagttaacttccaatttacatactctgcttagaatttgggggaaaatttagaaatataattgacaggattattggaaatttgttataatgaatgaaacattttgtcatataagattcatatttacttcttatacatttgataaagtaaggcatggttgtggttaatctggtttatttttgttccacaagttaaataaatcataaaacttgatgtgttatctcttatatctcactcccactattacccctttattttcaaacagggaaacagtcttcaagttccacttggtaaaaaatgtgaaccccttgtatatagagtttggctcacagtgtaaagggcctcagtgattcacattttccagattaggaatctgatgctcaaagaagttaaatggcatagttggggtgacacagctgtctagtgggaggccagccttctatattttagccagcgttctttcctgcgggccaggtcatgaggagtatgcagactctaagagggagcaaaagtatctgaaggatttaatattttagcaaggaatagatatacaatcatcccttggtctccctgggggattggtttcaggaccccttcttggacaccaaatctatggatatttaagtcccttctataaaatggtatagtatttgcatataacctatccacatcctcctgtatactttaaatcatttctagattacttgtaatacctaatacaatgtaaatgctatgcaaatagttgttattgtttaaggaataatgacaagaaaaaaaagtctgtacatgctcagtaaagacacaaccatccctttttttccccagtgtttttgatccatggtttgctgaatccacagatgtggagcccctggatacggaaggcccgctgtactttgaatgacaaataacagatttaaaattttcaaggcatagttttatacctgatggccagctttgtttatttgaccaagaatctgagttagctagttctaggtactgacaggataaataaaacacaacactgctcccgatcttctcagtttagcagagggacagatatgcactcaaataattaaaatatatcctgataagaatatagcataggtacgcgcgaagaacttggcaatcgaaattttgttgttcaggctgggcgaggtgtctcatgtctgtaatcccagcactttgggaggccatggtaggatgatcgcttgagcccaggagtccgagaccagcctgggcaacataacaagaccctgtctcaattcaaagaattgaattaaaaaaaacaaaaaataatttttttaaaaaagaaatgttgttgttcaaggaacaacaacaaaaatctagggaggtgttagagaagccatttgcctgagctgagagtaagttgctagtggttctcttgattggtaggtggggcctgggtttccaggcatggtagccaggaaggacagccacatggcaggtttgggtaattccaaacagtggaggaagggtgtctgggggaagacttgtagga

SEQ ID NO: 556 - protein, 982 aa, Homo sapiens [sequence omitted]

SEQ ID NO: 557 - DNA, 2949 bp, Homo sapiens
  source 1..2949: mol_type = genomic DNA
atggcaaactcaatgaatggcagaaaccctggtggtcgaggaggaaatccccgaaaaggtcgaattttgggtattattgatgctattcaggatgcagttggaccccctaagcaagctgccgcagatcgcaggaccgtggagaagacttggaagctcatggacaaagtggtaagactgtgccaaaatcccaaacttcagttgaaaaatagcccaccatatatacttgatattttgcctgatacatatcagcatttacgacttatattgagtaaatatgatgacaaccagaaacttgcccaactcagtgagaatgagtactttaaaatctacattgatagccttatgaaaaagtcaaaacgggcaataagactctttaaagaaggcaaggagagaatgtatgaagaacagtcacaggacagacgaaatctcacaaaactgtcccttatcttcagtcacatgctggcagaaatcaaagcaatctttcccaatggtcaattccagggagataactttcgtatcacaaaagcagatgctgctgaattctggagaaagttttttggagacaaaactatcgtaccatggaaagtattcagacagtgccttcatgaggtccaccagattagctctagcctggaagcaatggctctaaaatcaacaattgatttaacttgcaatgattacatttcagtttttgaatttgatatttttaccaggctgtttcagccttggggctctattttgcggaattggaatttcttagctgtgacacatccaggttacatggcatttctcacatatgatgaagttaaagcacgactacagaaatatagcaccaaacccggaagctatattttccggttaagttgcactcgattgggacagtgggccattggctatgtgactggggatgggaatatcttacagaccatacctcataacaagcccttatttcaagccctgattgatggcagcagggaaggattttatctttatcctgatgggaggagttataatcctgatttaactggattatgtgaacctacacctcatgaccatataaaagttacacaggaacaatatgaattatattgtgaaatgggctccacttttcagctctgtaagatttgtgcagagaatgacaaagatgtcaagattgagccttgtgggcatttgatgtgcacctcttgccttacggcatggcaggagtcggatggtcagggctgccctttctgtcgttgtgaaataaaaggaactgagcccataatcgtggacccctttgatccaagagatgaaggctccaggtgttgcagcatcattgacccctttggcatgccgatgctagacttggacgacgatgatgatcgtgaggagtccttgatgatgaatcggttggcaaacgtccgaaagtgcactgacaggcagaactcaccagtcacatcaccaggatcctctccccttgcccagagaagaaagccacagcctgacccactccagatcccacatctaagcctgccacccgtgcctcctcgcctggatctaattcagaaaggcatagttagatctccctgtggcagcccaacaggttcaccaaagtcttctccttgcatggtgagaaaacaagataaaccactcccagcaccacctcctcccttaagagatcctcctccaccgccacctgaaagacctccaccaatcccaccagacaatagactgagtagacacatccatcatgtggaaagcgtgccttccagagacccgccaatgcctcttgaagcatggtgccctcgggatgtgtttgggactaatcagcttgtgggatgtcgactcctaggggagggctctccaaaacctggaatcacagcgagttcaaatgtcaatggaaggcacagtagagtgggctctgacccagtgcttatgcggaaacacagacgccatgatttgcctttagaaggagctaaggtcttttccaatggtcaccttggaagtgaagaatatgatgttcctccccggctttctcctcctcctccagttaccaccctcctccctagcataaagtgtactggtccgttagcaaattctctttcagagaaaacaagagacccagtagaggaagatgatgatgaatacaagattccttcatcccaccctgtttccctgaattcacaaccatctcattgtcataatgtaaaacctcctgttcggtcctgtgataatggtcactgtatgctgaatggaacacatggtccatcttcagagaagaaatcaaacatccctgacttaagcatatatttaaagggagatgtttttgattcagcctctgatcccgtgccattaccacctgccaggcctccaactcgggacaatccaaagcatggttcttcactcaacaggacgccctctgattatgatcttctcatccctccattaggtgaagatgcttttgatgccctccctccatctctcccacctcccccacctcctgcaaggcatagtctcattgaacattcaaaacctcctggctccagtagccggccatcctcaggacaggatctttttcttcttccttcagatccctttgttgatctagcaagtggccaagttcctttgcctcctgctagaaggttaccaggtgaaaatgtcaaaactaacagaacatcacaggactatgatcagcttccttcatgttcagatggttcacaggcaccagccagaccccctaaaccacgaccgcgcaggactgcaccagaaattcaccacagaaaaccccatgggcctgaggcggcattggaaaatgtcgatgcaaaaattgcaaaactcatgggagagggttatgcctttgaagaggtgaagagagccttagagatagcccagaataatgtcgaagttgcccggagcatcctccgagaatttgccttccctcctccagtatccccacgtctaaatctatag

SEQ ID NO: 558 - DNA, 32187 bp, Homo sapiens
  source 1..32187: mol_type = genomic DNA
tagcatgagtggtgggattgaagtaaactgaaataaatggaaggcatttgtttaacctatgatattgctgaaagacaagtcccagcacagtagctttctcctttaaagactagccagatgtcggcctttttaagagcacaaagaagggagccacagaaagaggtaacaatgctggtagagaatggcagctacagtaaggttgtttttaaatggatagaaatctatgtaaaggtgactccgacaaaacacagtagctgtctcctcctcagtcatttaggcagaaacttgcactaagtaaaaaggtgcaaggtatttatcagcaattcccattatctggtacttttattgctttggcatgattagcagagactgtttggccagcgttgtcaactatttgctttttcatcagcctgatgtttggtctgcaatccctctaaaactaacagcaaaagagaaactcggaaacttgggaagtttcagttggcattcagatgtcaccccagcctactctctgtgagatttattctgcattttagaagctcagtggctgttgctctttttgatagccaacaagaagcaacgtcatagacctgtttggctgctgtcctgggtagaagggtttggcagccctagggagatgaatttctccagcgttggacccgcccagagcggagaagcaacacccttccagccactactctgttgctatgaaacaaaagactaggaaggtaagcgaagcaggaagtcccgcctttcagccccagatggctttggctcccggtcccgacgctcacgcccacctgccaccccttattggttagctccttcgtgccttgcatcccttcgtccatttcctttcccgtttccactttcgttcccgggagagtccaggcccctcatttctctccgagtccaattcctttctgacgtgctgcgagcgggccttcctctggggccattgtgtactgtggaggacgtggacggggcggcagcgcgaggaggacgggcgcctcccgtccattggctgcacccgctgtcgggcagtgcgcggttgcgcggcattggctcagcggcgcccggccccgcccccgccccgccccgccccgagcctgggtcctgtgtgtgccacaggggtggggtgtccagcgagcggtctcctcctcctgctagtgctgctgcggcgtcccgcggcctccccgagtcgggcgggaggggagagcgggtgtggatttgtcttgacggtaattgttgcgtttccacgtctcggaggcctgcgcgctgggttgctccttcttcgggagcgagctgttctcagcgatcccactcccagccggggctccccacacacactgggctgcgtgcgtgtggagtgggacccgcgcacacgcgtgtctctggacagctacggcgccgaaaggcaagaagggaaggggtcgccggggaggctccacacttcttgccggcccgggggcccggggtagccaggcgcgggccaaggaggaagaggggacagccctggctctcagctgcctttgccgccgccgtccagtttgaagtggggcatttaaagaccagaacccgcaggccggggaggagggagagggcgtccaggcagacggcggtgaggactgcagcaggcggccgggaggcgcgtccacccaggcgccgagcccacagtgtccctcccgcgccctagacggacggtgctgcgggcacgggagggacactttgtcccctcccagtccaccttcctcctgcagctcagacccgaggggccgggaaggggcctgagcagggaagggacacaggcgtcctgaaacaaagctttgggttgagggcagaggcgaggagccagagaagtgaactcctcctttccgtggccgctcttgtcatttttctcttttctcttttcaaatgggctatttgtgtgttaatttcatttggttcttgggaataacgactcaccgcgttgatttaaagaaaggtgttcgtgtgtccgtacttggtggttttagtgtgggacatgccctgcgcttttgttgacaacagagctgtcccttacgtttgtgtaggataatctttatgtttatgtaacttggagaaatctaacagagtgaaagtgaagtttctgcgtaaggctcccaaaatgtatgataggaccttcagttgttctggtattttgaattggaattaaggcaggaggggaagaacattctgtttttatctaggtgggggaaacctgtttaagttttgtttgttcttttttttttttttatgagttgagtattagttcagccttagctacttgaaacgtgagcaggatgcatctttaactcttagtattgtaaaagcaaatctaggatcactgctcttaaaactactgtgtgtaaagattgagagtgtaaattcacaagcttattgataaagatgaatccggaacttttggttttgctctaatcgatggaggaagatgcagtggtacaagttagtctctagttttctggtgggtaaatattttcaaaaccaactaacttttctttttttaaatctgccttttaaagaactaaaattccagatggcaaactcaatgaatggcagaaaccctggtggtcgaggaggaaatccccgaaaaggtcgaattttgggtattattgatgctattcaggatgcagttggaccccctaagcaagctgccgcagatcgcaggaccgtggagaagacttggaagctcatggacaaagtggtaagttctgtctgacgttgcctgtgcgaaacactattcactttgtctgtggtttctccagatttatttatactgttaattaataccaaccattgttatggcaacaatcttttgatttcaattcatcatttttcttcaactctgtgttttttgaaaagttggattcaaagacttttttgttttttaacctttcatcctttctactctttaaggttcagagttcctctacatgactcagtatgtaaagttttaccattggctgctttttgttggtgtatggccatagaatgcttggaagtgtttgttctgtcttctgtgaggttgtgttgctcttagataacaaaagagtaccagcaggttatttaagtctttgaccactcatgacaatcatctggtatgatactgaaaatatttactggggaaagaaacagattagttcttaagtgaagaagcagtagttgagggagtttccattttcatctttgagaattcatcttcattaagaaactttttttgttgttaatgggagagttaacagtttctttcatctactattccattttgaaacaggaaacctttcgatggcacattgtttattgtgaaaggaaaatttatgttgggggtggtgaggctgagagtatcagaaacctctgtggtttctgcatgttgctttcagacaaactataatttcacaagaagaaatcatgatgggtgtcagtatccagagaagtcaatctgaataccttacagagatttactcagaaactgtagctgtcagtatcctaccttactaagtatgattataaaataaatttaagatgtagcttgctgctttgcaaaaattaataattcttttttttgaagcagtagcactgtcctggatttattagtaaatgtttggaacacattatgactttatttcatagatatctggggccaattataagtttagttgaggcaagactcagtatctttataactgaagaaatggaggttttaaaaacaaatttctgtgtaaggatgtgccaaagcatccatgaaatcatgtgataacattcatctttgctttgatttgctcctgtctgtaaatattggctataaaagccactatcagtagtagtagcaacatatgaatgtgacaagatttccattattttcatttattctgatggaagggacacacagatgaatgactggcctgtcattctacaggcaatggtgctaaatgcagagccagaatatttttgccagataaatagccttagttttgggcttcagtgtgacctatttacgcttctgccaatttattcaaattgttatattaaagtgctccagacagaatgatgtcatagtgtcagaatattgcaacttgctgcttggggttcagttttgattttagcattggatactttagaataaggactattcaattggaaaaatagcatatatttgtcaagcacaatgctgcctatcttgtctttgctaaagagtgtgcatttgaaggtcactctcactgcctaaatcattagttggggtaagagaaggaattcaaggtttttctctaacttatctgctacgtaagtggacagcaaatggttcagattctataaaggggctgttctttttcccccaccctccaactttgagtggtcagtgtttgtacatttgtgttaggacatcaaatcaaaaagatttatataaggatgtggtgagctatagttactataaaatcattatttttgaaacattaaaaatgatgtacacaattttggtctgtaactggttgttaacataagttttattcacttttaattatttcaccatgagttatggtaaaatagatggttatttgatagttaaacatctgctattgtttattttattaacccttctgtgggtttaggtttagtctctccaattgagaaacttgacccaacaaggaaatctattatcaaaagtctctacttagtgggatgtgggtgcgggtgttggcaaatgtacattgcctgtttgtcttcattatttgtcaaagatgaaaatggttgtgttcatttgtgaatgtacccaggggctttgtggagagaaattgcataaattattatgaaagaattcagtatgtttatttttactgtaagatacagtaaatagaaaggcattgataattactaattggcagtatataagtgtgtagtacagaaacatccccctcttttgtttatcttttcttatttgttagtggtgaaggaagtggctcataatatcaacattgtcctgatgattacatcaggaactttattattagttctgaagttaatcccttgacacattacctttttaaaaaaataactgcaatagcatgaatttagtttgtgaataacagaaaatagcaattttcaagtctaattggtaggtatgtaaaaggcagagttaagtgtatagttaatatttttttcttatgaagcctctttgcaagggtagatcttggaagtataaatatgaacacaagcttcaatttcagtgtgtttcagctaccaataaagtaaaataactatttttacagggaataatgaagcagtcttgggttgtaggggaaatatctagtgagtatgtagttttaccatttcttggcctctggaatttaaaatggtcaattgaaattctttccaattaatgttctgttttcagagggcaggcttttgctctaaggtcactgagaataggagagcgtaattgctcagttgtgttccttataagatgtagagtgttttgtaacagaaaatcagtagcacagagttagcatagtctatgttttgaggaaaagaatagtagatagtagcatatcccaaaacatcccattacagattttctggccttagctctgtgtatgtgtaatttgatagccgacccagaagccctcacatcagtggatgcttatttgatacagtgatagaagtattaatcatgaatacatatctaggttcaagtgcgccagaatgaaatgtggagtctgttctgaagctactcaagagacaaggtttcttaaacacttaataaacattttttgagggcctactgtgtttccactgagtgctcgttactggggatatgaagctagacaagacataatcccgcctttgacctgtcaaggaactcagagaacagtatcagagccaaacacataaatggataattgccatgtagtatggaaagggctatattacaaaccccaagtacagtgggaacagagtagagaacatcctccttgtttttctggccagtgttgagacagttttctgtctggattctgctggccattgccttttaggaacagcattattgtgttcttgttggaaatgctgaggtgagagtaaggaaatgattactaatcagtatggttggaatgataatttattaatgtgaggttcctgagcatggttttcataagaatcttagccaggtgatggaaaatagaagaaacaattttccatctaatagatactaaatgtactgagcatacatggatgcttaggaaattagaaaataattaattgatgctgaagagcaaagcactctgagtacctgcctcaaatttttgttttgctgtcctcgtcatttattttaaattacattaccaaaagaatttaaaaagcatttaggaagtgatgatgcccagtaggcttttcctgccttttgccctcagtctatttagtacatttttcaagcttgaaatataatttacactccttttaatttaattgtgatcataatatattttaaagtttgtcaatcaaggatgcttggattatatataaatattttaaagaatacaagtcaactttcttttctaagctgagttcctcatatctctgaaagatattccatgtggactaagacaggttttagatgcctgttgtttgtgtttactaagttggagactcttacattcctagagccttaaaaccagggatatcattcatttgaattatacttcttgacgtatttccttttcctcactgaagttgttccaccttagcagaatcatgggttgtggtagacttggttaggggataataacaaattgtctggacagttttgtttagtactcagttcagttttgaatttgtgttgtgataaatgaagtgatcccaaagtttggtacatgacttcttagaaaagctattgataaagtgaaagatttaaaggaatcatatgaagacttaccttggtttatccctgtgatataaggcattcatataatgcaggccttaatcagttagtagtcttttaaatattacagaatttttagcattgagattttgaatctatttctttcttctttttagaaggtgctttatgtgctatctgttgatttcatcattcatttatcaaatctcaactatggaaagacagacatttccaaatagctatgccatagagtaaaatgtagtaagtgctttaaggtagtataaataaagtgctgagatgtagtacgtggtagaggtgaaccgttgcttgctaagggtgaaaagttggtgtagaatgaagcatggaggaggtgctggccagctcatgggttggagtccagtgagatggaggacatgttaggttgaaggaatgatagattgttgagtaagagaggggaagttagggtaagatgatagaggttttgattgcttttgtcaaataattttgtcttaatttatttggtagaaaaccattgaaggctgttaatcagggagggaaaacttcagggctgtgctttgatagaatacttacttgactctgtaaagcttgaattaagagaaaaaaactgaaagcaagagtaatgatcaagaggaattaaaacagtctgggcaagaaataatgaaatgctggcctagatacttggaagtaggtgtagcaagtgttggttcagatgtgggaggcattttggaggtaaaatctacaggtcttggtgaccccttagaattagaggatgaaagagaaggtgcagtgaaagtgactcttgaggttttcagcctagttgactccgaaggcagtgatgcacttaatgaggtaaggaacgtaagaaggaaaagaggaagtgtgcgggttagtttttggccatgctaagttcagtgtaccagagtgaatttcatttaaaatcagaaaattaagtgtacagttcaagagagaagtagaaacaagagacacatatttggtagatattctcatagagatagcatttcaagctatataactgtcagagatttcggaggaagaatagagggagcaatgcagagaaaaagtcagataattgaattctggggagattgaggggtgtaattaaataccagagaaggaaagagaatcctacatagattagtgatgagaaaggtagaattaaaccataatgacatcctaggtacaaacagctttaagaagaagataaaatctgaagttctgataaaactaagttcagattcaagtagagaaaaccaaacagggtgaaaaattaagaagtcattgaattgtatgattagaggccattattgacctttgtggagcagtttaacttatgtgatggggtgagattaaaatgagtatgtggattatttaaaaattgttctagaactgtaacaacaatgaaaaggaagggagttctgttagcttgaggatttgaacatcattgaaataactctgtgtgtgtgtgtgtgtatgtatgtgtgtgtgtgtgtgtgtgtgtatgtgtgcacacaccataggagaggttcaaagattggtgggaaaaaaaaaagattgatgggaaaggatgtagttagggaatggcctaagatgcaagggaaaaagaaatagttgaagcagtagcattctagattaaactgtgggagggaaagagtaggaacaagtagaagggttaatcttggcgaataaatgtaacttccacttacacaggaggaaagcaagggaatatacagagaagttttgagggaatttgtaaattttatattgggttgtcaggaagtgatttaaggcataatatttataatgtttaaaccatgtttttaatttttatatcatgaaatatgcaatatatgtattttaactagtcttctagcatttaagtgggtaaataagtaaaaaattaaaatggaaatcaattctcatctttaatattaagtttatcttattatacacttgctgtgacttagaggatgccacagtgctatttttatctactctgcttgggcatatattaataatattattacaattttactaaaggttttttttgtttttaagtatttgtaggttgctaatttttttcaagtaatgaaagacacattttgaaaatatccaacacattttataggtttttaacatagttacatttagatgattgttgagcttatattatcttacagtatcaatgaaaaaagtattaatagttataatattctacctgttaaaagatttaaaaaaatattaaagccctacgtcttttcctgagagcctcttgggtttgaagaaaccagaggattccatgtcagctgacaggaacactgacctgggcttagccttatttcctgcttttctgcacagaacattccaggctttttaagggttttaggcagcatgagtaactttatgagctaaaagagcttctaaaaatcatgatcctcaacaaactgttcagtgcccttggtctaattttcatacctttgcaaaatctgcagggattttgccttgtgatggaatgtaaaatatggaagggagaagaaatattaagaaggagatagggctaactatgttctggacacagtgcatagcactttacatttcctcttgtaagaattataatatcctaagaggtttcccgaagaagaaccctgcccaaggttgtaaagctagtaaatgttagggccagatcctaggtttgcttgattctaatgtctgtgttcacagtatgaagagtgaagcacactgctccatggaataatatgatgcttcctttttccaaaggaagtaaatcaaaagggcatttcccctcctccacttccatatttgatattatcaaattcttctccaaactttgtactcatttttaggcagctttattcaatgtagttgtggatatgctatttgtaatataattttcctgagaggttcgtccttaccttgtttgcttcctcctcctcttcctcctttctgccatcaaatatttgttgcacatctactatatgcaaagttccatattaggtgatagagagagaccaatgagaaagactgttcttcactttcaaggaagttccattctcatttggaagaaagagagtgaacagaatacacaattgatattttaattacaactagtcagttctttaatggtgcttcttaatgtcaatcttctgaagacatcttcgtggaaaaccataaaggtcttggtaattttctgtaaattcagctgtgctggactcatgatcaattttatatgccaactttgttttgcccaattaataatctattaaaaaagtgtatttttatacttttttacactgtacatttttatacttagtaaaatacatttttataatttttatatttagtaattatttgctgcattaaaatggaaagaacccaaagaactcttcggtacctgttattataaagagagagatatatatatactttaggtcactgtaataagaaacctcttctaacatttataggaggaggacagggctttcttttttttttttttttttttgacacggagtctcactctgtggcccaggttggagtgctggagtgcagtggcacgatctcggctcactgcaagctccgtctcctgggttcacgccattctcctgcctcagcctcccaagttcctgggactacaggcgcctgccaccacaccctgctaattttgtttttgtatttttagtagaaacagggtttcaccgtgttagccaagatgttctcgatctcctgacctcgtgatccgctcgcctcggcctcccaaagtgctgggattacaggcgtgagccaccgcgcctagcccagggctttctatattgtttttaagaatgaggcagttcacttgagagtatatgacttgattcagtgtaactgaatgctccatgaagtgaggcgtgttttataatgaaagtcttatagtataggcacaattccttactgttgaaattttcattttatttggtaagagttctttcctatgtttcacaggctggtttgaaccttgtttgcaaggaatgtactatctgatctaatacatttttattaccttttggctggaagttttaattaaggcgcagtcagaaaactctttaaatgcaagattattccaagaataagtaatgactttgaaaattcttatagcattagtaaatcctgtttttgtatttgtgcttttgctttgatatggttgaatatatgtatctaaatacatatttatgtattggaatgcatagccaatatattaataatatatttttattcatgtgaaacaatgcatgtacagagagagtctccttaaatatttctaatacatttaagcaaatacaaaactcagttgtatattggtatggagacagttcctgattctcaagtccagctatcagggttctgagcagtaaccttagttaggttctagttctgtatttcaatattgacacgtcaaaaggaattggtcctggtaatttccaaattttttgagtcaatggctatagtggaattttcagcctaattccaataataaatgttttgccttttagttcaacagaaaagagcaatattgctattgaaccaattcttttatgcaccaatcggtgccctacaaagttcatcattttataatgtgactacagatttgttctttgtcaaagctcttctgtgttagtaccaagcttcattctaggaagcaatttaggtatttctagaagaggtgtaaccatttgaatctgaacttgaccctggtggtgagcttgattttctctctaatatactgcctttagaaaagcaatttttctttcctggcttttgcagctccttgcacatagcaggtattcaataaatatttattgaatggaattgaatttgacctgcttagaagtcatagtcctgatgtagggttattcatttttggcagaagctgtcataaatcacagggtttaatagtaatccaactgatgaactgcgcacccagtggcataccgtagttcagcattgtatgttgcactttcccaagtgcaaatttagaaaacagtttagcctacagggccttgatgaactgactctggcctatttcagatctctcgtactactcactcacagccttccttcctatgctctgatcttttagaataactgcatttacttctctcttaacatgcttgctctctggtgtctcttaagccttagcacactcctttgcctagaatactccttttggcaaatttaagtatgtatttcctgacactcttatgtggagatgagtgagctgctgcttttctcctgtagcagtttgtacttgcctccatcatagcactaaattctcctgtaattcttttcctaagccaccagtctttcccactaggcagctgcttgagggcaggtgtgtgatttattcctttctgtgttccctagagcctgaaacaatgcctgccacataaatgtttgttgaattaacaaatgggtcctgaagtttacgtaaatttgcaaatggaataaaataaaaatgtaaatgagtttagcagggatcattaattatatgcctaattttaattaaattgtgatacagttagaaagatcagcccgagattcagaagatacaagctcttgtattggattaatgatattttaatggtcccttaatctttctagttcttagtttttttaaatctggaaatgaatggattgggtggaatctttactaagatcccttagagcaagaattacattgctcttaagttaattatagagaactacgtctcttctgccagactctttgcatctctttgaatcaggaagtatgttctagtcatctataatttcctagctctaagctcagtacctggcatatagtagttcaagcaatttccacctgataaagcaataaattcccacatggaattacagttttaaataaagcaaatgagaaaaaagttcagataaagaatagtgaattaaatatttgtaaaacataaacgtttctgtcaaagaatatttatgtggaatgtctggaaaaaaaatacctgacagaaattttgtatgtatcagttaaaaagttctctagtagaggaaatgaatttgaagctacctggtccccaaactagaagaaaataatgtatcagtctgtgacatgttacaccaagttttatgttgctgacattaaactatgcctgctgtagaatgttggtggcaatattcttggtatttatgtatacttgtgatagtatttttggtttaaataatttaaaaaccatattctttttcaagcaggatttgttaaataattggcatatttgggacttaatctttagggcagaatgaactctgattatactaacgtatcacgtattaaaaagggggtaaaaaaagctctgtcagccattttcactatactttgtaaagatttgctgttatttagtaaatgagatgacatcttacctttccaaggactttcttggagataaaaatactattattactttttaactaagcctatacctttggattattaatttgaatacttgatactttagagttcaattgtaaaaataaaggaaataatacaatcaaactatttgtgaaaaaaaaatagcagtcaaccaatccattaatttgttggttatgtactcagcaattctgctttaaggcattgtttacaaagaggaagaatataagatcatgccctgggttaatgtgaaaaacatcttaaattagaggctgatggttggaaatttgaaccagatttttctctccatctactccctctgaaaaaaaccctgatccccagtgatttcttttttttttccttttcttttttttttttttttttttgagatggagtcttgctttcttgtccaggctgagtgcagtgatgtgatctcagctcactgcaacctctgcctcccgggttcaagtgattctcctgcctcagcctccttagtagctgggattacaggcacctgccaccacacccagctactttttgtatttttagtagagacagggtttcaccatgttggccaggctggtctcgaactcctgacctcatgatctgcctgtctcggcctcccaaagtgctggggttacaggtgtgagccactgcgcctggccaatttctttaagaaagtaagtgtgatagtgtgtataagagtaccctttaaatttgttagttccttgatttattgtgttcgttatgcttgaagttattatagttcgattgtttatttgtcccaggcacttttatgggtgcccagaggcagatccatgttttatgtcccctgaaacttatatgatttgaaagaatctttctaaatataaagaatacgaaagtacaaacatcaaattgtttatgaaagtgaattttttttagaatgagaaaaatccacaaagcactatagtttttaaaaagccggtatatctacaagtgattagagaaataatctagactagtttttggctctgtacattttatactttgattatcttccgttaccgcatatacttccagttttgggtgtcatgaaacacattcaaattgccagatttgaattggatttcactgttcccatggtaggctagtcagcattgtgggcacctcaggtatttctaaaaccatcttttaaaaaaagttctattacagatttaaaaaatattgtatttatttaaggtgtataacatgatgctttgatatatatacacatagtgaaatggttactacatcaaataaattaacatatccttcaccttccataattacctttctgtggtaagaccatttaaactctgttctcttagcaaattttcagaatacagtattattagctataggcctcatgctgtacattagatctccagtattaattatcctacataacttcaaatttgtactctttgaccttcttctctccatttcttcccctccccatccctggggcccacccactgttctactctctgtttctttgttgcttaactccttcttttaagattttgcatgtgaaaatgagatcatatattaatagtatattctttctttgcctgccttatttcagtttcattgggattgctgacagtaattaaaccattttacaggagtgactgtatgcctcacatataccttccattaaacccaaagtaaatgtgtcttcaattcaaatttccattagccagattccaaaaatacccacagccactccagtgccacccaacaggaggctttagccaattatgtttaagatattatactcttaggccgggtacggtggcgcacacctgtaatcccagcactttgggaggccgaggcgggtggatcacaaggtcaggagttcgagaccagcctgacaaagatggtgaaatcccgtctctactaaaaatataaaaattagccaggtgcggtggcaggcacctgtaatcccagctacttgggaggctgaggcaggagaatcacttgaacccgggaggcagaggttgcagtgagctgagatcgtgtcactacactccagcctgggtgacagaatgagactccgtcttaaaaaaacaataaaataaaataagatatactcttgacaatttgacaaaaaaaaaaaatacaacgagggccttagaagagagccatgtatctttatgatctttatgtgaacatttaaccttttgtaagagtgctgtcccattacactatataatgctactgtgcaattctcaattatttcatttgaaagttatttatgtaaagagttgattatgccctttctggagggataagaatgtggtggactaacttactcttggctaaatcacatgaacatgtagaagtgaatacattagttggattactaccttctctggccggcagaaggtactttcagttctgcaggcagcccctgaacgccccagtggttgggcagcacctgtgatgggatgactgaaccgttatatgccacatgtttataggcgtggtagacagtatggggaggtggaaaagactggttctgacctgacacacatttactacttaataactcagttattcaaattgcacctctttgttttattgtcctcggggttcagaacagtacaccaaaacgctaattaacaaactatgagacagcaacagctgggaattcagtgtagtaaaataacatataaatgtgagacattggttgtcaacagagaaggcccatttcctcatttttatttaaaaaaaaagactatcagtgatatacagtgattagcatactggagttcttttaagctatgcacaatgaggtatcttagaattaaactttagaggttcaaaataaggatatgatatagaaaagattgaatggtaggagaacagaataggatttatttatattatgacaaacgtgactatcagttaataaattggagatagtaagttaagatcattatttatattatggaaaaatgaagaaataggacatggttctctaactttttaatttttctgtgaaataaaatattatgacttattttatttttatctttgtttttaggtaagactgtgccaaaatcccaaacttcagttgaaaaatagcccaccatatatacttgatattttgcctgatacatatcagcatttacgacttatattgagtaaatatgatgacaaccagaaacttgcccaactcagtgagaatgagtactttaaaatctacattgatagccttatgaaaaagtcaaaacgggcaataagactctttaaagaaggcaaggagagaatgtatgaagaacagtcacaggacaggtaagaagaatatttcagatgttttggtgtaaaggtcatttatgttgctttttacttaatagttaacctaaacgtcaccatgtaattgttttggggtaaatgtgagtcgctttgtatatagtcatgtggtacttaacgatggggatactttacaagaaatgcatttttagacaatttcattgttgtgtggacatgatagagtgtacttacacagagctagatggtattacctaccgcacacctaggctgtatgatgtagcctattgctcctaggctgcaaatctatacagtatgttactgtactgaatactgtgggcagttgtaacacaatggtaagtatgtgtgtatctaaatatacctaaacatagaaaaggtatggtaaaaatactgtataaaaggccgggcgtggtgggtcatgcctgtaatcccagcactttgagaggctgaggtgggcggatcacttgaggtcgggagttcgagaccagcctgaccaacatggagaaaccctgtctctactaaaaatacaaaattagcccggcgtggtggcacacgcctgtaatcccagctactcgggaggctgaggcaggagaatcgcttgaacccaggaggtggaggttgtggtgagctgagattgtgccattgcactccagcctggacaaaaaaaaaaatactgtataaaagataaaaatggataacctgtaataacctgtataacatgcatggagcttgccagactggaagtgagtgagtgaacggtgagtgaatgtgaaggcctaggactgttactgtacactactgcagacttcagaaacattgtacacttaggctacactaaatttataaaaaaaatttcttttccaatatgaacagcctactgtcacatttaaacttgataaacttttaattttttttaactttttgactctggtattaacaattagcttaacaaaaatattttctttctatattaccctataagctttaaaaaatgttaaaaaattaagttttaaaaaaaattttataaactttttaaaaactaagacacaaacacacacattagcctaggcctgcacagtgtcaggatcatcaatattattgtcttccacctccacatcttattccactggaaggtcacacaatatgtaactttttcagattggcttctttcacctaacaatttgcattttagcatggagcaataacatgcatggagctatcatctgtgataatagtgccttcaggaatacctcctgaagggcctgcctgaggcccttttactgttagctgttttttaataagtagaaggaataccctataaaataatgttaaaaagtttatagtatagtaaatacatcaactagtaatatagtcacttattataatatcattatcaagtatgtgttatgcataattgtatgtgctatgcttttatgtgactggtggcacagtagatttgtttacaccagcatcaccacaaacatgtaatatgttgcactatgaccttgtgatgactatgacatcactaggtgataggaatttttcagttccattataatcttatgaaagcactaacataaatgcagtctgtcattaactgaaatgtccttgactgaaatgtcattacggggttcatgactgtatttgcttttaacattaatagctttatgtgaatttacttatgatagtagctagttcatgagacagtattctcaatgttttaatagacttcattttcagagtcattttaggtttacaggaaaattattcagaaattacagttcccataaatctcctctgcccaagcagtttctcctgttcacatcttgcattggtgtagtgtgttatagttgataaactattgttgatacattattattaactaaagcctagagtttacattagggtccactttttgtgttgtgctgttctatgctccataaatgcataatgtaatatatccaccattacagtgttatatagaattgtttcactgccctaaaaatgccccgtgatctacttactgtctcacttccccccctgaacccatggcaaccgctgatctttttactgtctgtgcagttttgccttctccacagtgttacatagttggactcacacaatatgtaactttttcagattggcttctgtcacctaacaatttgcattttaggttcctccatgtcttttcataacttggtagctcatttctttatgccactgaataatactccattgtgtggttgcatcacagtttggtttttcactcacaccttgaagtacatctcggttgcttccattttttgggtaatcatgtataaagttgcaataaatatttgtgtgtaggtattcatgtggatttaggcttttaactcatttgggtaaaatacctagcaagattgctagattttcagggtatgcataagtttagaaagcacataagaaactttcaagaaagtttgtaagaaaccccttgactggttccaaagtggctctaccctttttcattcccaccagcaacgaatgacagttcttggtgctccacatccacaccagaatttggtattggagacaagtgttttaaagacatagtttgattgaatctgcggatgtggtagatgtgggtgggagatgtaacttccatctgtgtattttgacttaagtgagaaactgaactgggctggcaaagactgaattgacatcaaccaaatcctaattttatagccaggattcttcatttagatatcctcattcaagtttattgtttggccattctaatgttaaatttcaggatctatcttaaacaaaataaggaaaatgatagagttttccatttctgggctattttaaatatatatggaatattcatgatagtgatagtttatttagatttccaaattggaaaaccaatattaatgaaaatatatagtgtcttaacatgttagttaaattttagtgtgagactcttaacctctctgtatttagttttctgacataggaaaacctttaagaaacctctaatatttctttcaggtcagaaaaactggcctcatagggttgtaaaatagaaaattcagttatggaggtatgtgaactctaaattttctatgaatactggccaaatacccataacaagtaaaaccatcaaattcaaacataaaaaaccctcttccaggtgtaaaatggcataattatatatttataatttataattttctctctcaattagagatgaacccaaacatactcgtagacgtctaaccaattatgtaactttgggctcgtcacttaatattcttgggccacagtttattcatcttgagggtggtgaatcttcctgttgccttttagcattaattaatgctttaaaattctccaggaataacaagaggaatttgagttgccacagtgtgacagaagtaaggtagagaaatattatagtgattgtttattcttgtacacttttcaagaagtgctaacatcttgggaagtcagatatttatgttaaatttttatttttcacattgtatttctgccattgacctaataaaactaagttctttacaaatgtctttataattcttttttcaaatttagtagttttgaaattcttcctgatccagccaagtcatccattaaattttactctttagggtatcagtacattgacaaggcatataactcctttgactaggaatttgagtggatacagtgttttaattggatgtaatcatatatgatgtggtaaacttgtatcccacttttacatcttctgtggaaacttgaaacattttctaactcagtagatgttttataatttccatttgataattttgatagttttgcttatgtggaaacatttcatgggagacatttaagttttgtttgataatgtatagattcccatagattttgatagctctcataatgctgactattcacaatgaggtcactcattctgtgtattcttgcctgcattttaagtgtccaagtgaattttgttcactgtcctaaatgcaaccctaagacaaaatttattggtttctatgctgatatagcatatccttaattggatattactgttatccttgttctgtttactgacaatgttctgtggccagctgtgtttatgcagaatttacatttgataaatgtttcataacaattcataataatgtaccattcttggtacaccataacaggcacataaactttcgaactgtgtttctttttctagtaatatatttggacacattcacttctaggttcccttaggattccaaatgcaaactgagtctaaaatgtgccattgcacatggagctctgaggcattttgctctacagaacacagaagagtcttcttagcatgttttcatttacagagtggcctcattctgaatagtcagcattatgagatctattgatctatgaaaatctgtacattaccaatcagaacctaaaagtctcccatgaaatgtttctacataagcaaaacaatcaaaggtagttaggcaacaaagtatatggtttagtagaatgactccacctaatcggtatgacaacgctggttactgggaatattataaattcactacagaattgtttctttgattctgtaagtagctcactagggacattactataattgagctaaaaatgaaggacagtaatagtagaaacagtaatttggagttaattgacttaatcagtattacttcatgtgattctgcccgctttattgaagaaattgtgctggatgagtacatgaatcaaaatgcatattttaatgttcctgcacctctgttgtgtcaacaataaatgcggattgttatacatttaaggggagatgagaaaaaatttaggtgtcaattctgaactgattgctttttaaaattttagttgattgttaatgatgaatgagtagcccgaattttaaagcaattttacataaatgtaataaatagaaagataaagaagtaaatggcattcaatacatttcctagttacttaggtcctgtgtagaaggagagaggtagaaattatagtcacataattgtatatgctactgaagtagatatttagggcacagtgaaagtcttttgccttgagagtagataatgatttctagtagagaaaaggcatgagcaggctgcatgcctcccccgactgatacagtaaaccttcatcttttatatcatttttcccaaattgttgttgttgctggtgctctgttgttttgttctttttctttctttctcttttcctgcaaacagttcaatgtcacactgagttggtgctactccagctgggtgtctaaaccattctgagctgacatttctgggaagagtaattcagtgatttctgacaagcataaagcttgcatgtgtatgtgtgtgtatgtgtggagagaaggtaaagaacatgtggagaagtctgtagtttgaagcatagagaaaaggagaaactctaagtattatattacttaaagttttagtggcgcaagtaaaaatggatgtgaaggttgtcattgctaacaaatgtataattgataggaggcatttctatgattttactggcagtttcatcagttaaccattttaatagtaaaatttatttcttctgaaaagtgtgtattaatcagctgctctgcaaggtctggtgttggccactgtgttttttaaaacactcagatgatggccgaaggatactgagattttccctatttttgaactgcttgagtgagccagggtgctacaacccattttcccctcctacacactgctagacaaccactggaaaaaaagtcaactgaggtggaaaaaatagctctgcctttgatagactgtgaagaaaataaagattaacaaaagctctggccagagaggaaaacatagatgttgccttaacattaacattaatgtcatttcagagcctttgaatcatgccttaataaccagtgttgtagaaaaaataaatgacaaaatggggtgtgtgtgtgtgtgtgtgtgtgtgtgtgtgtgtgtggtggagggttacatgttctgtagttaaaaaaagtatttgacatagaaaaattagctctagaagaagctagcctgtatttaaaaggcttcaggagcatccggcagaaatatttttctccattgactgtttggctaaacaaagaataatttgtaatctgctccattaataaagtgcctttccccttaaaggactacagatcactatgcttgctgtttctacttgtgttggttatttacaagatagtgtaccaaaaaacattttgcaattggtacgttgaagatacatggttaaaagttgaatcaaaagcaacagcagccacaataataacaagagcaacaacaaaacaaaagctgcaaacaaacctactttctttccttatgttactgtatgacatcattgctttgagtaaagaatacagtagtattaatttaaatgcttaaatttatatttatacaaatgttgatagcatggtcattgaaatagttttgcaagtcctcacaggttttcagtttaccatataaagagattgatctgtatgtgtaatttgtgctttaagtggtagttttaatagttactggacctcacagtttaatgggcatgtttataatgctacatcaattaccacattttctcatagttctgtatattgtgagaagaaaatgaaaaaagtgctgtttaactaagtacaggaatgtggagccaggaaatctcatgctctgatgccatttcttctcccagtgttctttgtaactttggttggcttcctgactccaatttacattttttcagttattaaattattttctggttattcataacattttcacctcagacatttcaatgtcacaaatgaaaattaagttgtttcagactaaatgctactgttgctacctcagtctgttaatatttcaactttagtagtagtttctatagtaaaaatattgtttttgttattataacaattatttgcaagagaatcttaagaaggtttgtcttttataaataaattatactatattggatatctatgaaatatgtaatgatacatgaaagggaatggcttatattcatcattaaaataattttacatttaaaaaattaacctagtttttctgtttctcctttttttgtttactaatggtgaaaattgcaattattttgaatttgatgaggacaaaggaccaattgcaagtagaaaatatttctaaataaatcaaaataggcaactaatttcttttgaacacaagtattttgatataaacatatacatttactcattttttctatatttgtttgcattcaaggcattttttccttttaaatgggaaactagaggaatgaaaatatgaatttttgatacttcaaaataataatttttatcttggattcagaagacaaatagtaatcaatctcttatgtagaagtatgtctgccagataggaagtagaatttgctttagaaagcttgaaaaatcttctgagattgatttattgtaaatgaataaaaagtttattttatcttgatgagaatgtttttatgcatatttcaagcatctgagtggtgtgaatagacttttctaaagtttggaaatgaaggggctcatttctttaacacaccatgaaagtagaggccacaagaaagttatttagacaaatgttttcaaagttaaacaaagggagtctgttaggggaggcaggtgagagcttgcagaatctttgactgttaaggactttatggccctgtgtatttggctaactgcacccctgctgcttagctagctagatacaatgtaattttcttgttgatttttcaatgaaaagtgaaagttttttttttttaatagcagtttcctctctagggtatattttacaaaatacaaaagaaaacgaaattattcagatgtaattaaaatgaattccaccattagctttttaaattttaataaaatgcttacttgtaatacatttatttgctatttatttcatttatttagtttagtttttttttttttttctaagccccatgttaatactgttcagcccccaactcctggtttcttagtaactaaaacttattgcaagtattttaatttcttctaaatcagattatatattatgcacatatgatatttggatattaaaattgaggacttttttcccccacagatgagcatttgttaaatgtttatatattcctgagaatgataccaattattatatatattaagcaaactcacaagactcaagtgaacttggctttgcagtggaataccgtttatgtttttcagtcttaggtagcttattaaaattgatgttttcctttcagtaaatatctggtgacattaaaatttgataattaaaatccagaagcactcaagaaagaatgcctgcttttagtttcataataacaatactcccacaaagaaagttgatgaatgatgtctttcaagtggcagagttgttatttagttaaagaaagctcctttggcagtttcttacaaaactaaattaaagtttgtttataaaacagacaagctacagtgataatcctatagcctcaagagtgcttggaatctagcccaagaagagtcttgtttttcagtgatttaacaaagaagtggagtttccaagaatccaaacagattagcattcagtgctaattgggtagggtgtaaaatagtattcatgtctgattgttttgatgtgaagtacttcataaccattccgttttctaaatcttttaaaaatattaatcttttgtctcttcagatttattgtttgagcatgagtttttgtttgaggatatatgtatacatcaatggttcatagatgtgctgtaaacagcaagacacatgagatcattacaaaaagtgccctttatagattaaaataataaagagagattgaggctctgttgttcagtggaaacattgaagaacaaattaaactgaaagataatttagatgttctattgaaatgtattactttgaacatctgatcatgtgattataatataccactttcacatataatcacaaatgtgtgactgtatttgtttcttcgggctgcggtaacgaagtaccacatactgggtggcttaaacgagagaaatttattctctcacatttctggaggcaagaaatctgaaatcagggtgtcagccagcagggccttgcccctcagaaccctctagaataggtaatttctttgtctgtctcagtttctggtagctccaggaattccttagcttatggcagcgtaagtctgttctctgctctgtcatcacacagtgttctctgtgtatgtacgtgtgtgtccaaatttccctcttacaaaaacaccagtgattttggatcagagcctacccttgtgaccccatcttgacttcattacagctgcaaagatgctattttgaaacaaggtcatattgacaggtaggattgaggttagaatttaaacatatctttttaggggacaccattcagtccctaacagtgaccaaatatggcagtgtacatttatactaaggaggggaagaaagttgaaacccattagaacatgtcatggaggtttgaaaaacttggattaatagaatataatagcaaacaaaattacttgtaattattttttgtaaaggtctgtagctgaaataagtttttttcaggtgtgtaatgcatggttaatttatgcattagtttttataaatatattggaaaacatggcatattctgcatttcccaataatacatttttgtatttattgatataattgaatttgtaagtacctttttttaacattcttaccgattttaatgtataaagtgccatctctctttagaaattattagtaatacaaatatgtacatttaatttacatttataatattaatagccctggttatttcttaacaatccctgttttctttaattttgtgataatctctggaggattaattagaataattataacttattaaatctgtttataaacttttccctattgcacatagaaaataaataattgggaagtgttttccatgttggtgacaaagagaaggcaacaaacaccacattcattttgtctttaatattaaaatatggagtattaaacatgatttcaattcaaattttaggaaatcaatttgaggattttagtttaaacaagagtaaatgattgtttctgaaagtggcatgttgaatggtttaaaccatgggtcagcaaactgtacagagccagatagtaaatagtttagactttgccagatggtctctggcaattagtcagcgttgcctctgtactaggaaagcagacatagacagtctgtaaattaattgacatggctgtattttgataaaaatttatttacaaaaatgagccagaccaaatttgaccattgggtggtccttcgccaacccttggcttaaagtacctatctaatttttggagagtaaaattttaaaactattttatcaacaccaatccatcatataagttgcattatatgtaagtttcatcaacacagactgagtatataagttggctaaaagtaacaatacccatctaacagtacaatgctgtcagagacccaggctctttctggcttattgtaattcatttccttagcatgttgggttttatcttcattctgttcccttcacagttgtggaattcctgttgcagcttcattttttaaggacacaaggcaggaaaggggaagggcaactccacacgtgtctgtcttcttatcttgaattgcaaagctgtcccagtaccttaccacctacttgcttctctagcagattctcttccatattatttaagccactgggtcactccaggttacaaaggtagcggtatattgaaactttgaaatttcagcctccatagtaaagaagggcaagggagaaacggtgtttgtttagtcagtctaaattgtcaaaggagatagccagatatctctttttgagagataaacagacactcttcatttaaacatggtataacttggctttaaggcatatttctttaaaaatatattgtcaaggactgcgaagagcctgaagctactttgccatactttcagggctagcagaagacaggagaatatttggtcggggaaaatgaaccatttattagtcacagagggacagcattaggcaaggggtcatcacttgtgccaggtcaccaaccctcagtttctataggacagtataaagggcaggagacacctgcatgtgcagtggctggcattacagatgaatcccaagcctaaggaccctgaatttttataatggacagtaaacctgcctgactcttgctctggaaggagacattatctttattgaactggactgtaaccctctttttttttttttctccagaggaaaacactgtccctattatctaaggctgtttgatacacaaatgttcctgaaaggataatttgaaaggctggcagtatctggttgcaagacatgaaaaaatgtgggagacctatagatacttctccccaaaatatttatgttctgttctttcttaaaaaccataatgtatctcatgttctcagttttgaatgctacttaagagtaaggatatttactctattttggattattggtaagcttaaaatcttgggttctgggctgggcgtggtggctcacacctgtaatcccagcactttgggaggctgaggtgggcagatcatgaggtcaggagatcgagaccatcctggctaacatggtgaaaccctgtctgtaataaaaatacaaaaaaattagctgggcgtggtggcgggtgcctgtagtcccagctactcgggaggctgaggcaggagaatggcgtgaatccgggaggcggagcttgcagtgagccgagatcacaccactgcactccagcctgggcaatacagtgagaccccgtctcaaaaaatatatatatatcttggtttctgccattttaatatatataacaaattatgtatttgatatatctaatatgtatattagaaatctcacatatatgtgaaataatgtgatctccagaacaactgtggaaactttgtggtgtgaacatttttaattcctttttttttttttttgaaatgaagtcttgctctgttgcccaggctggagtgcagtggcacgatctcggctcactgcaacctccgcctcccaggttcaagcgattcttctgcctcagcttcccaagtagctgggactacagatgcacgtcaccatgcagagctaattgtttttgtatttttgtagagatagggtttcaccatgttggccagactggtctcaaactcctgaccttaggtgatctgcccacctcggcctcccaaagtgctgggcttacaggcatgagccactgtgcttggcctacattttttattcttgtttgcatattagaaaaaaaactttaataattaaagaaggaacagttttacaaagacttttcatttcaagctcattatcctttaaaagagaagacgattatattttcttctttttttttttttcttgagtaatacttcattcacttttcaactttgactactgtaactttaggtttagacccaaataattggtttcagtaggtaaggaaggttgaaattatgtgatataagaatgatattgtttatctttgttatcagtgtctaaacctcagagatgagcaccaggtagtccaattccattttcctgtgtggagaagctaaatagattggaggttacatgacttgacacactggggtgtgcatgtaatattcatgtgtgatatatttctaaatgaagtttcgttaccagttggcatgtctgagcctacagctgttggcatatgaagggtatcagaattataatgcctttttcaactttgtttcgggaggactcatttgaacaattagcacattttatggttgtgaaaatgaactgttgttttttctcttcattaaaccagaattaatattgtatgtcatctggtcagtcgatgcaacttttttttttttctaacacgatgcttgtattcattaaattcagaaagactatttaaagctttatttttcaagtatacctttttctgtaaatatctcttcctttctcactctgtttatgtatatacatgtgtgaaatattacttgtaactttttaagcatttaatttgtcttgatgggcacagatttttaaaaaggaagtaagaaagattacctagttttttctgaactatattaatgataaagcatctcagctcattttacagatgctgaaaacccttcgcgttttgttctgaaggtttttgtagggcatactgattttctatgaagtatgtggagctgtcaattttattcttttttccagagatttcagaaaattttcatttaactaaagatttccatcctggtcagctgggtctcatttacctgattaaaataggtttgcatggataaagtcttaaagcaaattctccttaccacattttgtgtgaattttttcctctttaatactaattttagtttgttctcattacaattgcatatgtaaaaaatactttttgataaagcaactgaaactttgaagttgataatttatcacaatacttttttccccattatatcaacacttggcaaactacagactgtgagcctaatccaggttgtatttccttctgtgagtaaattttcaatggcggagccatgctcatttatttacttactgtctgtggctacaatggcagaggtaagtagttccatagagactatctggcctgcagagctgaaaacttttactctctgggcctttactgcaaatgtttgctgattcctgcattactgatatcattttcataacagtcttaaaaacttggcatttttaaacttaaatacttttttctttttgtcgctttcttctctaccctatctctgccagcagttctttgtgaattaccattgtgatcttctaaaggcaaaaaaaatggtaggtagtcaatgactgatagctatagacctatgaaactaacatttcctatcttgtctcaatattctgatgtatataatcattttaaaacataataaatttaggccttttttgtttttgtttttaacacaagatatgccactaatgtctgacaagcatttaatctagtggctttcctgcattttccatggatcagatgcattctaatcctctgaaatgattattaaatacagattgccagcctttatataatgcctgctaaatttaccagttgggatctgcacatatattggtaaagagtgccctagcagtttctgaccttctgtctgctttcagaatccacatgagtcaaattatctccttttatgtataatcttatcaaggactattgaggtggcacaggtggggatggaatcctggatgtgttcagaactcctttcattttactaagcttcctttatactaccagaggaatccacttccagtctcgagtcacttagaagagggggccgggcgtgatggctcatgcctgtaatcccagcactttgagaggtcaggagatcaagaccatcctggccaacatggtgaaaccctgtctctactaaaaatgcaaaaattagctgggtgtggtggcatgcgcctgtaatcaggaggctgaggcaggagaatggcttgaacctggtaggtggagattgcagtgagccgagttcacactactacactccagcctggcgacagaaaaaaaaaaaaaaaaagaaggatacatttctgtaaggtttttaaagttttgttggaaaagatggattgcaattctcttcttatgtttttctgagattagcctaatcactatccttggaatttacctttgcttgccagccttttatcctgcccctttctcctccctttcctatttccagtttatgcagatattctttcttattactggcatagctaacattcccactctatccccatgcccatcttggctctgattttctgatcattctagctaaaatgtgtcttttccttctgaccatagcatttatcaaggcctttcatgtggcagttaatgatatattgtcaaatattgttatctttttaaaatggtgttaggagcctgggtaacagagagaccccatctctacaaaaaaaaaaaaaaaaaaaaaaaaaaaatagccaggtgtgttggcccatgcctgtggtcccagctactctggaggctgaaatgggtgagattgcttgagccaaggaggttgaggctactgtgagctgaggtcatggcgctgcactccagcctgggtgacagagtgagaacgtgtctcagaaaaaaaaaaaaaaagaaaaaaaggaaaaaaaaaggtaataggctatgtctcttctgtgtctcccatggtatccagaacagtgctttatacttggcaaacactcataataatatatggttatttctttagaat

SEQ ID NO: 559 - protein, 207 aa, Homo sapiens
MQSGTHWRVLGLCLLSVGVWGQDGNEEMGGITQTPYKVSISGTTVILTCPQYPGSEILWQHNDKNIGGDEDDKNIGSDEDHLSLKEFSELEQSGYYVCYPRGSKPEDANFYLYLRARVCENCMEMDVMSVATIVIVDICITGGLLLLVYYWSKNRKAKAKPVTRGAGAGGRQRGQNKERPPPVPNPDYEPIRKGQRDLYSGLNQRRI

SEQ ID NO: 560 - DNA, 1361 bp, Homo sapiens
  source 1..1361: mol_type = genomic DNA
agaaaccctcctcccctcccagcctcaggtgcctgcttcagaaaatgaagtagtaagtctgctggcctccgccatcttagtaaagtaacagtcccatgaaacaaagatgcagtcgggcactcactggagagttctgggcctctgcctcttatcagttggcgtttgggggcaagatggtaatgaagaaatgggtggtattacacagacaccatataaagtctccatctctggaaccacagtaatattgacatgccctcagtatcctggatctgaaatactatggcaacacaatgataaaaacataggcggtgatgaggatgataaaaacataggcagtgatgaggatcacctgtcactgaaggaattttcagaattggagcaaagtggttattatgtctgctaccccagaggaagcaaaccagaagatgcgaacttttatctctacctgagggcaagagtgtgtgagaactgcatggagatggatgtgatgtcggtggccacaattgtcatagtggacatctgcatcactgggggcttgctgctgctggtttactactggagcaagaatagaaaggccaaggccaagcctgtgacacgaggagcgggtgctggcggcaggcaaaggggacaaaacaaggagaggccaccacctgttcccaacccagactatgagcccatccggaaaggccagcgggacctgtattctggcctgaatcagagacgcatctgaccctctggagaacactgcctcccgctggcccaggtctcctctccagtccccctgcgactccctgtttcctgggctagtcttggaccccacgagagagaatcgttcctcagcctcatggtgaactcgcgccctccagcctgatcccccgctccctcctccctgccttctctgctggtacccagtcctaaaatattgctgcttcctcttcctttgaagcatcatcagtagtcacaccctcacagctggcctgccctcttgccaggatatttatttgtgctattcactcccttccctttggatgtaacttctccgttcagttccctccttttcttgcatgtaagttgtcccccatcccaaagtattccatctacttttctatcgccgtccccttttgcagccctctctggggatggactgggtaaatgttgacagaggccctgccccgttcacagatcctggccctgagccagccctgtgctcctccctcccccaacactccctaccaaccccctaatcccctactccctccaccccccctccactgtaggccactggatggtcatttgcatctccgtaaatgtgctctgctcctcagctgagagagaaaaaaataaactgtatttggctgcaa

SEQ ID NO: 561 - DNA, 12646 bp, Homo sapiens
  source 1..12646: mol_type = genomic DNA
aagcatttgattaatgcatgcttaaacataaagaaaggttacatcaattcacactcataccagcagactttgacactatcactctttaccctgttcaacattgagtcttgtgtttttaaatatttttgtaaagaatataggtaaaaagtggcattttttctttggatttaattcttatggatttaagtcaacatgtattttcaagccaacaagttttgttaataagatggctgcaccctgctgctccatgccagatccaccacacagaaagcaaatgttcagtgcatctccctcttcctgtcagagcttatagaggaaggaagaccccgcaatgtggaggcatattgtattacaattacttttaatggcaaaaactgcagttacttttgtgccaacctactacatggtctggacagctaaatgtcatgtatttttcatggcccctccaggtattgtcagagtcctcttgtttggccttctaggaaggctgtgggacccagctttcttcaaccagtccaggtggaggcctctgccttgaacgtttccaagtgaggtaaaacccgcaggcccagaggcctctctacttcctgtgtggggttcagaaaccctcctcccctcccagcctcaggtgcctgcttcagaaaatggtgagtctctctcttataaagccctcctttttcatcctagcattgggaacaatggccccagggtccttatctctagcagatgttttgaaaaagtcatctgttttgctttttttccagaagtagtaagtctgctggcctccgccatcttagtaaagtaacagtcccatgaaacaaagatgcagtcgggcactcactggagagttctgggcctctgcctcttatcaggtgagtaggatggagtggaaagggtggtgtgtctccagaccgctggaaggcttacagccttacctggcactgcctagtggcaccaaggagcctcatttaccagatgtaaggaactgtttgtgctatgttagggtgagggattagagctggggactaaagaaaaagataggccacgggtgcctgggagagcgttcggggagcaggcaaagaagagcagttggggtgatcatagctattgtgagcagagaggtctcgctacctctaagtacgagctcattccaacttacccagccctccagaactaacccaaaagagactggaagagcgaagctccactccttgttttgaagagaccagatacttgcgtccaaactctgcacagggcatatatagcaattcactatctttgagaccataaaacgcctcgtaatttttagtccttttcaagtgaccaacaactttcagtttatttcatttttttgaagcaagatggattatgaattgataaataaccaagagcatttctgtatctcatatgagataaataataccaaaaaaagttgccatttattgtcagatactgtgtaaagaaaaaattatttagacgtgttaactggtttaatcctacttctgcctaggaaggaaggtgttatatcctctttttaaaattctttttaattttgactatataaactgataagtcctctctacttcacagattaagaaattgatactcaaaaaagttaaataacttgttttaaaccacatagtaagtgccgaagccaatctgtgagaccaggactgtttgtactctaaatggctgcaccacatgaggcaaaatggctcgtgatggttttatttcaaagacctagaaaacactatcacagctggtgctcccgtctcagacccacagcaacgatgtctccacttcctgcttcatcttgggtttctcacgtcttgaatgtgcacacaaatcacctggggatcttgttaaaaatgcagcttctgtttcaaaagacccagactggaaatggagattccgcatgtctagtacgctctcaagtttattaatctgctgctggtcctaggaacatattgagtagcgaggggcaggatgtgactcctgtaaggagtggccaggcattttcttagagacctgtgttataaagtatgcttttccttaaaaaaaagaagaaggaggaggaggagaagggccaggtgcagtggcttacgcctgtaagcccagcattttgggggaccaaagtgggaagatcacttgagctcaggagttcaagaccagcctgggcaaagtagtgaaaccccatttctacaaaaaattaaaaattagccaggcaaggtggcacacacctatagttccagctacttgggaggctgaggtggaaggatcacttgagcccaggaggtcgaggctgcagtaagccatgatcaagccactgcactccagcctggagtgtctcaaaatagataaataaataaataaataaataaataaataaataaataaaagagacagtatcaaagacccaatcacctctagacatctggcatcataggaatgtgcccagtctgctctggggataggaaagtggggatcctgtctccccctgtgtagaggtttcagtaaaagaaaggcctaggtgtgcagaaagctttcaggcaatgccagggaaactgatcattgtaatgaatccagggtattgctgagtgagggcatcctggagggcccggtggaaatgtggtcaggctcttcaatgcacaggccctagttgatgagtaatcagggtttcaaatatttccatctctgtctcaagcagaaaacaaatggaaaaactgaaccaccagaaaagcagagccagagatggaacaagaatcccagtgtttgtacccaaccaagagcgtgtttttcttccacagacaccaatgttcaaaatggaggcttgggggcaaaattcttttgctatgtctctagtcgtccaaaaaatggtcctaactttttctgactcctgcttgtcaaaaattgtgggctcatagttaatgctagatgcttccttcctctatttccccccaaatttcctgggaacccctggtcaataccagcagtaagttccactgttctagggtgtagaaatggctgtgacccagcagcaagagggaaggacatcagatgtcatcagtggtcatactgcaacacagccctttttctgtttaggaatgcaggtacccacaacatttactaacactttttttttcttatttattttctagttggcgtttgggggcaagatggtgagatatgctttctttctttcttttttatgaaatcaccccatcattctttgtagttatgaatggagctttctcttaggcctcccacagaacttccacagaggtcaggaaaaggagtttctgccatctacccctttgactttcctcacaagtctggagatatttctagcccagaagagggaagcaacagaggcaggaaataatgagtcttaaccatacaaaagaaaaattgagacttaaatgaagttgaaagcactaacagttttcatttgtttgcatttcatatttgatgtgagattctgcagaggagacgtagccagaatgcatgcacagggttactctggataagctgctggggcaacatttggatgtgtgttcagaatcacatgtctgaatactctgaatatatgtgtgtacatgtgtatttatgcaagtgcacatgcatatgagtgtgcccggcctgaacttactctctcaaccacagcggtagagtcaggagtgttccaacattggaagcccctctattcaatcagctcttccaaactgagtgaaccaatgttgtatttaatggcaaccatggctggacaccatggctcacacctgtaatcccagcactttgggaggccgaggtgggcagatcacttgaggccaggagttcgagaccagcctggccaacatggcgaaaccccgtctctactaaaaataccaaaatcagccagacatggtggtgtacgcctgtagtcctagctactcgagaagctgaggcaggagaatcgcttgaacctgggaggcagaggttgtagtgagccgagatcacaccactgcactctagcctgggtgacacatcgagactgtctcaaaaataaaataaagacaaccattatgccagcctagattccgccatgctgcctaatttgtagtgtccttaggagccatttttgtaaatagtcatcagataagatgtaaggcccataacagctttttctatgcagctgagggaattggaagatccattgtttcctaagagttgagggaagagtcccaacccacgggagcagggtctgatcttcattgccgatagaaacattactaatggcttcttactgtttccttttcaggtaatgaagaaatgggtaagaagatttccactctatctagcaaaagttttcaaatatggaatgaaatgctcatagagtacaatcacagtaacaaaccctgagaactaaaactattaaagggaaaatacaagtatctttcaatgggatccgtatgaaacttgcctgtatttgttgctagctgtcatgtcagattatagctgtgcatatatgtatctctgatcatacacatatggatgtgggttggagctaccatgtgtttttgtataagccatgaaatctttgaaggcagacagagacagtgtctcatttacctagcccagtgtctggcacatagtaggtgctcaatgaatattttttgaatgaataaatgaacaaacatatgaacacattgctaattacctcccctcaagaagctgatggtcttgtgtgagagacaaataattgaaaatatagtgagttgcatgttataatatgggtagatacagagtaaaatgaagtataaagaggggagtggtcaactctactgagtgtcgttgggaaaggttccctgggggaggtggtccttgagctgaattttaaaggataagcttatgttttagggaagaaaaatattttatgcagaagagataaagctgtatagtatgaggataagagtctaactgagctagatcagaatgtttgaatcttggctcaactctctacttgctgggtgtgtttgagtaatttacctaacttttctgtgccacagcatcatcatggtacaatggaaataatagtgctacctaacttgtagggttattatgaggaccaaatgagtaattcatttaaggcacttagaacattatctgacataaaaggcagtaggagggccgggcatggtggctcacacctgtaatcccagcactttgagaagccgaggtgggaggatcacctgaggtcaggagttcgagaccggcctggccaacatggtgaaactccatctctgctaaaaatacaaaaattagccaggcatggtggcaggtgcctgtaatctcagctactcaggaggctgaggtaggagaattgcttgaacctgggaggcggaggttggagtgagctgagattgtgccattgcactccagcctgggcgacagagcaagactctgtctcaaaacaaacaaacaaacaaacagacagtaggtgaattttagctattaatacatggaaagcatgctgactatagatgataagcattaaagtttactgagcatgtatgttttaggcattgctctaaatattttacttgaatttcctcatttaattcttccaacacccctactgtacagttaaggaaacaaagcctcaaataaatacagaaataaacaaaaataagtaaacaatccagtcctggggatataaatgcagatttaggccaagtgccatggttcatgcctataatcccaacactttgggaggccaaggcaggaggctcgcttgagctcagaaggttgaggctgcattgagcaaagattgtgccactgtactcgagcctctgtggcagagaaagaccctgtctctgaaaaaattaataaatagaaatttaaaaataaaaaaattttaatgcagatttatatgataccgaagttcattttctcaaccattatgaaatactgtttctggatatgtataaaatctttgtgagcacacatatctttttttaacttaactttcattttaaattcaggggtacatgtgcaggtttgttatataggtaaacttgtgccatgggggtttgttgtatagattatttcatcacccaggcattaagcctggtacctgttagttatttttcctgatcctctccctcctcccaccctccaccttctgagaggtcccagtgtgtgtcatttccctctgtgttcatgtgttctcatcatttagctcccacttctaaatgagaacatgtggtatttggttttctgtcactgtgttagtttgctaaagataatggcctccagtcccatccatgttcctgcaaaggacgtgatctcattcttttttatggctgcgtagtattccatggtgtatatgcagcacatttttttatccagtctaccactgacaggcatttaggttgattccatgtctttgctattgtgaatagtgcacaatgaacatacgtggagcacatttctgtctaagcacagacatctagacccttgtgtgagcatgagttaagtctaagctctgctactgaatttgtgccaataaaagttgtgagcaattttctttacatttttttcaaacaaacacacccagcagagtataatgtctatgtactttatttatgatttctagttcatttaacatgtctaagaaacatccgtgttgaaaaattatttataaattaaaataatataaactatctactgtccttatactcaactcccaattataagcaggtggaaaaacctggagaatgttttgtttacattctgtgcagtctttgtcagagggctgcctgagcaactgggtcagagtttagttctgctctgggagtagcaggacctcaagaaggaaaggaggaaaggaagtaactttttcttgagcacctgctatgtgtcattcactttcaccttcataatccatttaattttcgcaaaaactttgtgaggttggtgttttatctccatttccctgataaagaagttgaggttcagcaaagttaaatgacttgccctcagtcacacagactagggcagatccaggattcaaactcagggcttctgactcttgagtccagagctctgtccctgacagcagcagcactgcctctcctctcttccagctgttatgtccagactgtagcagaacccagtgttccagccacaagttttccaggaaataataaaggactcctagctccacctcccagggcaaaaatggctgctgtgggaaacacaggctggacctacgaatggcattagtggtttattagttgatttcagttgtccacactaataggcctccctctaacaaaaataattgagagctgattatgctcagatataatgtaaagtgaagccactttttattggaagaagcattccctcaaaacgtgtagagtatttcacattatttaaaggcaaatagagagaaaattatatggaataagaacaaagatgtttcttctctattatgagggactcagttctgagaaaggattttaaattgtaagaaataggtaagtccacgaatcagtgattcagtggtgtggagagctttatttctgagaaggccagtagcgctcccttctgacaagcaaatctaagacctggatgacagatgacttcctgcatttggttggttcttttgtcattcatatctatctgtaatacagttctggctaatttaagaggataagcttgaagacctctggaatttttcggctttaggactttaaggctttctgagcttcagtagatctagatctaggagctcatgctggtatattctgaatccgatgtatctgagttacatctatgagctacttaataaatatatctatgagctaaatctcataggctaagcatgaacctcacctccaagactcggggttcctaaatggatgagaccctctttgggaagtcttgtgggcagtgtctaattccactagaaaagttttacctacaatttaaacttaaaccatgatattttcttactgctgtttccttttttcattttcaggtggtattacacagacacgtgagtttattggtcttttatttatgccctgtctgaggatgcagattggtgggtagatgagaaggaactgattgagagagattaaccccaagaactgatatcttcccagcattgcattctcaactccattttagaaaggttccaaatagggacttctgtgggtttttctttacatccatcttacccttcccaagtccccatgtccctgcgtaaaccctaaagccacctctcaaaaggttctctagttcccttcaaggttctctagttcccttcattccacatatctcctcttccacaccctctagccagtagagctcccttctgacaagcaagtctaagatctagatgacagatgacttcctgcatttgggtggttcttttgtcactaatttgccttttctaaaattgtcctggtttcttctgccaatttcccttctttctccccagcatataaagtctccatctctggaaccacagtaatattgacatgccctcagtatcctggatctgaaatactatggcaacacaatgataaaaacataggcggtgatgaggatgataaaaacataggcagtgatgaggatcacctgtcactgaaggaattttcagaattggagcaaagtggttattatgtctgctaccccagaggaagcaaaccagaagatgcgaacttttatctctacctgagggcaagaggtaatccaggtctccagaacaggtaccaccggctctttagggaggaccattcaaaagggcattctcagtgattttccctaacccagctcacagtgcccaggcgtctttgcgcttcctcccacactcaatcctgggactctctggtaccacacggcatcagtgttttctggaatatagattaaacaccaatatgaggcttctgggtaaccccagtctgtgcgagatctaaaatagcaactccctaagagacaggactgggtcatttgcaccgcatcacacccaggttcatagcacaccaacatgagtttatctaatgcttcctccagagataaatttttcagaaaggtttgcaaaaaacactcaaggccactatagtaaaatggcataagctaaggtataataataaaataataacaatacttaacatttattgagtgcttattaagtctcaagcactgtctgtacccaacacttatcaaggattctttttcatgtaatcctctcaacaactatatgggttaagtatcattttattcccatgagtaaagggatgaggaaacagagggtttgtgagttgaaaacacatttcacgcttctcacagctagtgagtaataaagctgggactcaaacccagggctgtttgactccagtgcctctacccacggccaccactctttgcttgtcaatgttgttctaaacatattgaagggggggctctgaccgtggcaagcgtgtgagtagtaaggggagaatggccttcatgcactccctcctcacctccagcgccttgtgttttccttgcttagtgatttcccctctccccaccccaccccccacagtgtgtgagaactgcatggagatggatgtgatgtcggtggccacaattgtcatagtggacatctgcatcactgggggcttgctgctgctggtttactactggagcaagaatagaaaggccaaggccaagcctgtgacacgaggagcgggtgctggcggcaggcaaaggggtaaggctgtggagtccagtcagaggagattcctgccaagggggacgaccagcctgggccagggtgggtggcaagtccacagctaggtcagaacagcttctctagagcttctatgcacagcttctattactgtgatgacaagatctcaacagacggtttcaaatctcacatcactcccctccttcccatcctagaaaagtgcaaaaaagtttatgaaagtgatgggcttcctcacatacctgtcaatgcctgcagtcatccgattccgcccctaagctgtgggaagagagactttgatatattagctcctgccttttcctttcccttcccctatggagagaaacaatgggaggatcttgagctgaggaaagtcacaaaatgatgagaagagtgtagggtccttagagatgaatgaaagaaaaaaaaagagaaaggacgtctgaacagaaaagggagcggtagaggagagaacaatggggtttgccattctctatctgggtctcactggcacagacagtgctgcaagattggttccctcatgggaatgaaatgtttcccctccttcctccgcaggacaaaacaaggagaggccaccacctgttcccaacccagactatgaggtaacgtgggatagaaatgggccaggacgctggaggggatgtccctccaggggggaaggaaacagatgggatggcccatcttgtctgccagatgcctcaaagcccctcactcagggcttccattacaaccctctatgtgccacctctgcgtccttcatggtaaaacaggactgtctcaaaggctgcatggcttccacaaccatggagaggtggaagcttgcaggagacatactcctctttctctggcttattcattgactgggatacagccatggagaatattatatatgcaaattctaacacaataaattctgggctgatattccaccagcatgcaccagtatagcgagttattgaaatattaaaattatataaatattatataaaagttattgaaatattaaaatactcattgggaaatagccccaaactttgctcaccccaacccacccttacacacacacatacacacacacacacacacacacacacacacacacacacacgtgaccagacatcccagtccctcccctaccgggctgcctcttgagttggggtaacaaagagttaatgcctggcatggcagaggatcaccaggattgttctagttgattggtatgtgtgcactcctagttgttaaatattttcactatcacacctggatatactcaacaaatatttgttgagccaaatactcaacaccagccaaacacgtagtatttactttagcttaagcgaattatttagccctgacagaagccctggaatgtgggtctttaagttcctatttttgagatgggaaagctgaggctcacggaaggaggtgaccagctcaagtctcctaccgtccatgccaaattagaattccagcctgcctcctgacttcaagtccaaagttcttcccacgcactaaagctagctcttcagtgtcctttcttaggaggtacttcctcccgcaccactgaccgccccctctctatttcacccccagcccatccggaaaggccagcgggacctgtattctggcctgaatcagagacgcatctgaccctctggagaacactgcctcccgctggcccaggtctcctctccagtccccctgcgactccctgtttcctgggctagtcttggaccccacgagagagaatcgttcctcagcctcatggtgaactcgcgccctccagcctgatcccccgctccctcctccctgccttctctgctggtacccagtcctaaaatattgctgcttcctcttcctttgaagcatcatcagtagtcacaccctcacagctggcctgccctcttgccaggatatttatttgtgctattcactcccttccctttggatgtaacttctccgttcagttccctccttttcttgcatgtaagttgtcccccatcccaaagtattccatctacttttctatcgccgtccccttttgcagccctctctggggatggactgggtaaatgttgacagaggccctgccccgttcacagatcctggccctgagccagccctgtgctcctccctcccccaacactccctaccaaccccctaatcccctactccctccaccccccctccactgtaggccactggatggtcatttgcatctccgtaaatgtgctctgctcctcagctgagagagaaaaaaataaactgtatttggctgcaagagttgctgtccctgttttctgagagaccctcagaggctgccttaactcccaagaccattcaggttctcactatctttgactaaattctcagctatgaccccagatgcgagcactctctgtttccacagctggtagggccgttacctgaagctctctttagagagggcataagggaataagaaaaaaaagagagagagagagtgaagggaggggaaagaaaagaaaaagagagagagaaagaaaaataaaaggaaagggaaagaagggagggattgaggaagggaagaaagaaagaggatgggagggagagaaagaaagaaagtttcaccaacttctcttggaggaaaacatcaaacgtggcagagaaagactgatgggtccctgatggagtggttggtagaaaatggacaagacagaaataggccttgaaagacagatgaaggtacggaagaggacggtggcggtggaagccgggcttggagatgggacacagatttccacaagctgccaggaaaagctgcgagccagggctggggaagtgaaggagggaggtgtctcaagcaggcacacccccaccctgaggcagccgcctgcagccaga

SEQ ID NO: 562 - protein, 182 aa, Homo sapiens
MEQGKGLAVLILAIILLQGTLAQSIKGNHLVKVYDYQEDGSVLLTCDAEAKNITWFKDGKMIGFLTEDKKKWNLGSNAKDPRGMYQCKGSQNKSKPLQVYYRMCQNCIELNAATISGFLFAEIVSIFVLAVGVYFIAGQDGVRQSRASDKQTLLPNDQLYQPLKDREDDQYSHLQGNQLRRN

SEQ ID NO: 563 - DNA, 2690 bp, Homo sapiens
  source 1..2690: mol_type = genomic DNA
agtctagctgctgcacaggctggctggctggctggctgctaagggctgctccacgcttttgccggaggacagagactgacatggaacaggggaagggcctggctgtcctcatcctggctatcattcttcttcaaggtactttggcccagtcaatcaaaggaaaccacttggttaaggtgtatgactatcaagaagatggttcggtacttctgacttgtgatgcagaagccaaaaatatcacatggtttaaagatgggaagatgatcggcttcctaactgaagataaaaaaaaatggaatctgggaagtaatgccaaggaccctcgagggatgtatcagtgtaaaggatcacagaacaagtcaaaaccactccaagtgtattacagaatgtgtcagaactgcattgaactaaatgcagccaccatatctggctttctctttgctgaaatcgtcagcattttcgtccttgctgttggggtctacttcattgctggacaggatggagttcgccagtcgagagcttcagacaagcagactctgttgcccaatgaccagctctaccagcccctcaaggatcgagaagatgaccagtacagccaccttcaaggaaaccagttgaggaggaattgaactcaggactcagagtagtccaggtgttctcctcctattcagttcccagaatcaaagcaatgcattttggaaagctcctagcagagagactttcagccctaaatctagactcaaggttcccagagatgacaaatggagaagaaaggccatcagagcaaatttgggggtttctcaaataaaataaaaataaaaacaaatactgtgtttcagaagcgccacctattggggaaaattgtaaaagaaaaatgaaaagatcaaataaccccctggatttgaatataattttttgtgttgtaatttttatttcgtttttgtataggttataattcacatggctcaaatattcagtgaaagctctccctccaccgccatcccctgctacccagtgaccctgttgccctcttcagagacaaattagtttctcttttttttttttttttttttttttttgagacagtctggctctgtcacccaggctgaaatgcagtggcaccatctcggctcactgcaacctctgcctcctgggttcaagcgattctcctgcctcagcctcccgggcagctgggattacaggcacacactaccacacctggctaatttttgtatttttagtagagacagggttttgctctgttggccaagctggtctcgaactcctgacctcaagtgatccgcccgcctcagcctcccaaagtgctgggattacaggtgtgagccaccatgcctggtcttaaaaccagtttcttatatatctctctggaggtattctaggcatatatgagcacattctcaagtacatattatcctcccttcccctatcttttagacaaatgatatcaaactatacatcttgtgagattattgcataccattatatgaagataccattatatcctttttaatgcaaccatattgtacaaatagactatgatttatttaacctgttatctatcagtggatatttaagttggtagttggttccaatcttttgctcttacaacaattctgcaatgactaacattgtataaatatcatttttaaaaataattgcattgaagcataatgtacatgccataaaatccacccatcttaagtgatttcacctgttctcagaaatttttagtaaatttaactaattgtacagccattaccataatccagctttaggacattttcttttttttcttttcttttcttttttttcttttttttttttttttgaagtggaatcttgctctgtggcccaggctggagtgcagtggcgcgatctcagctcactgcaacctccacctcctgggttcaagcgattctcttgccttggcctcccgagtagctgagactacaggcacatgccaccacgcccagctcattttttgtgtatttagtatttgtgtatctagtatttgtgtacttagtagagacagggtttcaccatgttggccaggctggtctccaattcctgacctcaggcgatccacccgccttgacctcccaaagtgctgggattacaggtgtgagccaccgcgccaggcccgtaactgtattttaatatagccattctatggatttaatatggtattttattatggccttaatttgcatttccctagatactaaccatgctgagtgtcctgtcttgtgtttattaaccattcatatatttttagtgaaatgtgtatcaaatcttttgcccatttttaagttgacttatttgtttgtcttcttactattgggttgcatatgtttttgatataagtcctttatcagatatatgatttggaaatattttctaccaatctgtggtttgtttttcttaatggtgtcttttgaagtgcaaaaggtttgaattttgaagtacattttattgattttttcttctatatattgtgcttttggtatcatgtctaataaatctttaccaaacccacagttacaaagattttctcctgtcttctttttatactttttacagctttatggttttagctctaacaataaatgtgattttgaacatacataagactatttgtaacaaacacaaataaattgaattgttgggca

SEQ ID NO: 564 - DNA, 12018 bp, Homo sapiens
  source 1..12018: mol_type = genomic DNA
agccgggcttgctggcacgcacctgtaatctcagctactcaggaggctgaggcaggagaatcgcttgaaccccggaggtggaggttgcagtgagctgagatagcgccactgcactccagcctgggcaacaaagtgagactctgtctcaaaaaagaaaaagaaaaaaaaagtgaaaaaaattcctgaatgaaggcctggactgaggtggctttccatttggaggtccagccccaagcatctgagagtccctcctaaattcattacctacagcaacaacaactagcaacaagtaacaactggctacgatcctaacaactaatgacagggacatttatctccctcatgaagaaacggtcccaggaccatctcccacccagcatccattgcggttccctgtgcaagatgagtctctgagtgggaatccagcactctctccctcttcttccccaccaccttcaccctccttaacggaaaaacaaaaggcatctgcacctgcagccctgctgaggcccctgctgctcacacttgcagcagagggtggaggctctgggttcttgccttctctcaaaggccccagccccaacagtgatgggtggagccagtctagctgctgcacaggctggctggctggctggctgctaagggctgctccacgcttttgccggaggacagagactgacatggaacaggggaagggcctggctgtcctcatcctggctatcattcttcttcaaggtaagggcctactaggggtctggaagcctggggaagggctcaagggaagagcccatcactagtgagacaggaatattggtatccctaaccttcagcctacctctgctgtcaccttagagttcaaagaagggcaaaatggaggctcttaactgttctctgctagagagaaacagtgtcccatggaggagaaggaatccttgtctctgaaaaatgcaaacagagtacttaaatggctgaagagaggaccctgttaccgccatcttagatttgaatgcagcccaaaagggcataggccaagaaactaaaaggaaaaagtatatgttccctacttcagagctgggggctagcagtcgacctaggaaatgtccattcactcagttgggcagttggccaattggtcaacaaagatgggtgagaccctaatatgtgatatgccatgaggaaataaaaatgaataaaacacttatgctctacagaactcatagtctcattggagagattagttttcatggtgccagactgagtgtacagtatagtatgggtgcctgcatgaatactccattggactatccaataggaagtggatgaactgggttgatgcctggagtctggacatcctgggaaagttaaaaccatggaatttgctgaagtcacacaagtactatgtgaggaagagggagctgaagatggaacagtgagggcaccaattttaaggggcagttagagaaaaaaaaacattccaggaaagagataaaaggagaatcaaagagctgaaataatcaaatgtatgcactaccttggaaaccaagagagtagagagcttctagaagaagagaattaccaagagtataaaatgttaaagagagcccactaatataagaatatatttaaaagtttaagtctgcgggatgtggcagaatatgcatcatgggtgatttagcacagtttcagcagggtattgtgagtggaagccaagtgaaaattggtagaaggtgaaggtcaggtgatgaggtcagcaagtgtagactattctttaaagacatttggatgaggagggagaaaagactgggtggtaggtagaggaggaagtagagtctaagaataaatgtttttgagggtgagagaaacttgagcacatttctaggctaaaggagaagatgatgagtagagcaaggtcctggagttgatggtggaaggacagagtcaagagtggggtcaagagcacagagaggaaggcaacgttaccctctaagaccaggagaaaggaagtgcaaacggcactggccacaaataggtttataaagggaaaggaagctaaaggagaaaggacaataacaacttccgtgttctaaaaaatccaggtgggaggcaatgccacctgctgaaactgagctgggtgatgaccggttgggagacttgaagaggacagtgagagtttagaatagaattatttctgagagaaatgcaaggaaaagtcaggtaaagacaacacaggttgaggagcaactctcaagcctgggtgaggtggctgcatatcatggaaagagcatttgagttcagcagtagaaaacctgagctctggatccagcttggacaccaatgagctatgtgtacttgaacaactcctccactgtctgggagttctcatgccagccaatccagaaatgtggcagggacgggcatggtggctcatgcctgtaatcccagcactttgggaggtcgaggcaggtggatcacctgaggtcaggagttcgagaccatcctggtcaacatggtgaaactctatctctactaaaaatattttaaaaattagtggggtgtggtggtgggtgcctgtaatcccagctactcaggaggctgaggcaggagaattgcttgaacccaggagatggaggttgcagtgagccaacacggtgccactgcactccagcctgggcgacagagtgagactccgtctcaaaaaacaaaacaaaaaaaaaagaaatgtggctatatgaactcttaagtcctaaaaggaaacctcactcagatatgcaacattaaaagatgtcaatcagccaggcacagtggctcatggctataatcccaacactttgggaggctagggagggaggatcatttgagcccaggagttcaagaccaacctgggcaaaatagggataccctgtgtctacaaaaactacgaaaattagccaggcatgttggcatgcacttatgccagctacttgggaggctgaagtgggaggattgcttgagcccaggagcttgaggctgcagtgagccatgatcacaccactgcacttcagcctgagtgacagagcaagaaaaaaaaaaaaagatgtctcaaaaaaaaaaaaaaaaactatgtcaatgatcagtgcaatctccttccctgaatccaatttagaatgaggggtctctgtcttctctcggtcttctgaccaggtggtcaggagaaaaactagttagaaacctctttaactgtttgtcttgccttttctcccatttgctcatttattcatttgcacattcattcaacaaataaagttcctaccatgttccagacactgcactggatactgttcaaaaataatcccgccctgcatgaggttctaagacagttcacttcttgtatttccattatactttgactcatgaccgcctctccctatcacacacactccacctctagccacactacctctcttgtccttttccaaagctgcatcttattcagctattctttctactcagaatgactttctctatctggtatattcttgcttactcttcaaggcccagacaaatgtcgtttcctctattaagctttccctgatcctcacccttggacaaaattaatagcttctacccttttttcatatgcagtcatataagcactaaaagataatgtatacattctattaaattaattgcatatatgttttaattttttcacttcattcataaactttggaagcagcagttgattcttcatatcagcactcttttctttcataatatctaattattttaggtcataatagtcctcgttaaatgtttggattaaatctaattgaattgaattcaagtgccagatctctgtaatatgtctaccatgcaactctactaccctaaggttttgtttgtctgtttgtttgtttttatttttttgagacagctttaacacctaggctggagtgcagtggtgcaatcttggctcactgcaacctccacctcccaggctcaaccattcctcccacctcctgagtagctgggactacaggtgcataccaccatgcccggctaatttttttgtattgtctgtagagacagggtttcgccatgttgtccaggctggtgtctaactcctgggctcaggcaatctgcccacctcagcatcccaaagtgctgggattacaggtgtgagccactgctgccagtcaactctgagttatgagacagatttgaggactaattgaaaagctaacttccctgggacatccagggtttttataataaaaggatcaccaaggctgaatattttataaggaactcagcctaaaggttttggatagtgcacacccactccttgccagggcattagctgctcaagaagcagagtgttctggactggataggcaatatccttacttacatatactacaatacaattctgatgctaaccccccaaattagtgtcagaccctacaggttaagagcatggttcccaaccagattgccctcactttaaatgccagctacaagttcagggtaccccagaccactcacatttctgacaaactgcctgcaatcttaaggattcccatgaccctcctcattgataatttgctagaataactcacagaatttaagaaagtgctgtacttcctatttcagttttattaaaaaataaaataaaatcagaaccagctaaatgaaaagggcaaggtctaggagggtcccgaacacagagcctccgtgccctctccccgtggaattagaacacatcgcccccagcactctcccacactctgccagcacattgatgggttcaccaaccaggaagctccaccaagtttttattgaggtatctttacataggcatgattgattgaatcattggccgcttgactgatctcaatctctaggatcccttcctggggctgataccactagtttcaaagctgcaatcctcttaccatatggttggtcttgaccagcaccatcctgagtcattgccatgcataaactcaggtatggtctaaggatccaccacagataacaaagccactcctgtcactcatgaaattccaacggttagaaacaccctcccaggataccaggacaaagatgagacaaattgtttattatcaccttgaattcaattgagtgatttagtctacaatccggaaaactaagtatagatactaccattttcatggatttggatctttcttcatcttggcctcaaataaccatggaaatacttcagggcatctgaacaactccatgcccagctaatactctatctctcttctgtctttacaggtactttggcccagtcaatcaaaggtaggagaaatggcttctttctatactcagactcagaatattgacggaaatttggcttcctacaacagtagtcctacaggagcgaacagtttagaatgaatgaaatgacggggatagagaggtgatgtctctattgtcaaccaaatcagtgacctgacataacctgttccgggcagcttgcctgtagctaagcatttaactggtctcttacaggagaagcaggaccctagtagctagggacacatctcaaactgtgacccatgaaccagtaggtattggcgtcacctgggatcctgacgttagtctctgtcaatccttctctttagttcatctattctacccaaagtgatctcatcatctggtatgctgttagcagtttcttacctgtatagtatcttccaaataacatgccccaaaatcccaaagttttacccctactaattacagcaatgtctcttttattcttcaccccctgacgcagatattggcgtcacccgagagcatgttagtaatgcagaatctcccctccccagaactactaaatagcacctgaaattttaacaagatccccatgtgattcatgtgcacatcaaagtttgagaaacactactctaatgatctcctggtatgcagaagcagggagaatttcagaggcaagatccttaatagaaccacggcttttctcatttcaggaaaccacttggttaaggtgtatgactatcaagaagatggttcggtacttctgacttgtgatgcagaagccaaaaatatcacatggtttaaagatgggaagatgatcggcttcctaactgaagataaaaaaaaatggaatctgggaagtaatgccaaggaccctcgagggatgtatcagtgtaaaggatcacagaacaagtcaaaaccactccaagtgtattacagaagtatgtaatcccctttggtctgtttgttgtgaaattaatcagtatttgctgttctggtgagctttttatctggggtgaaagtggaaatagatcctcaacagtaatattatcgcctgttctcttaatttcagcttgcctcttttaaaatactgtaagatacttccctcaccctattgaaaaactacagccagtcctgtaaaattttgtttacctttgggtgggctccatggattcaagcaattcagcactgagttgaatgaaggggttggggagacagaggtgatcataaggtgagcagcagtgagaactggagcgcagtggagcatgaagagtatctagtcttccttctgttccagatacttcctggtagttagactacatgggcttccccaggaatcctgggggacttaagagcatcaagatgcattgagttttggcgcaaggatcttcccttgccctgccacccacagaggaaaagcctgctgccctccacagcggcattattgcagacaggcaggagaaaacgaaccaggaaaaacaactttcgcaacctgaaggtttgtctctccttttccctacagtgtgtcagaactgcattgaactaaatgcagccaccatatctggctttctctttgctgaaatcgtcagcattttcgtccttgctgttggggtctacttcattgctggacaggatggagttcgccagtcgagaggtaaaagaatgctcttagatgagagatgggaccacctgagaccctcagctttcctcctaccattatgtacccaatggaagagactgagttggtgcttcttgctagtgtgcatagttgggtgaggctgtatttctctgagacaggagaaaggatacttggtgttatcacagcatgttcacctgtctcaagatacagctccctctgtgaaaaaaaaaaaaaacaaaaacaggcgcagtggctcacgcctgtaatcacaacactttgggaggccgaggcgggcagatcacgaggtcaggagatcgagaccatcctggctagcacggtgaaaccccgtctttactaaaaatacaaaaaattagccgggcgtggtggcgggtgcctgtagtcccagctactctggaggctgaggcaggagaatggcatgaacccgggaggcggagcttgcgtgagccgagatcgtgccactgcactccagcctgggcgacagagcaagactccgtctcaaaaaaaaaaaaaaaaaaaactattttaagtaaacccttacatacagaaaagtgaatcacaagcatacagctcaaaaaaaaaattcacagagcaaatacacccatgcagccagcacataatttaagaaagacaatattaccaatgccattgaagcccctcttgtggtcacttccagccactacccatcctcaagagtgagcattgtcctgacttctaacaacaaggattaactttgcttgtttttgtcctttatgtaaatggactcatatactaagtattcttgtgagtagcttctttcactcaacaacatgtttatgtgctttatccatactcttgtgtatatataaaactcttattgttatttagtattccattttgtgaatataacccaatttattatgcattctaccttgtgtggattctgtttcttttttgtgcagcttcagacaagcagactctgttgcccaatgaccagctctaccaggtaaggggatgaagaataaaagagacattgctgtaattagtgggggtaaatctttgggattgaggggcatgttatttggaagatcctatacaggtaagaaactgctaacagcataccagatgatgagatcagtttgggtagaataaatgaactaaagagaaggattgacagagactgaggtcaggatctagtgagcacaagttgaagaacacactgagagggacacacgaagaaactctcgacaggctgggcactcactatagacaggccatggctcatgcctgtaatcccagcactttgggaagccaaaacaggtgaatcacctgaggtcaggaattcgagacaagcctggccaacatgatgaaactctgtctctactaaaaatacaaaaaaaattaaccaggcgtggaggcgcgcgcctgtagtcccagctactcaggaggctgaggcaggaggaccacttgaacccaggaggtcgaggttgcagtgagctgcgattgtgccactgcactccagcctgggcaacagagaaagactccgtctcaaaaaaaaaaaagagagagagagaaaaagaaaaaagacagagcctccatctccttgtcctctttccatcctcaggaccatgaagtacccactccaaattctcacatataaaaaacattcaataaacatgcatcaaattaattaatagaggatggaaaaaatgacttatgactgtgctgtcctttccagcccctcaaggatcgagaagatgaccagtacagccaccttcaaggaaaccagttgaggaggaattgaactcaggactcagagtaggtgggttcttcaatgccaattctaataaaggacccttgcatcaactgccctcgcaattgcttctaagtctagctcccttccctaagcggctataagcatcagactctggggatcagggattgggacgtggtttggggtactcttttctaaaaattctggggccatactgattgtcttggcctaggtaaatatgaattttatgtatctgtaaatcctgtcagagcagggcctcaagccatagagatgctgaatattaatcttaacctacatttgaatttctcattatctacactattaacattttgggctaattaattatttgtgatgaggggctagcctgtgcattgtaggagttatggaagcatccctggcctctctccaccagatgctggtagattgtccagtgtgacaatcaaaaatgtgtccagacattaccaaatgtgtccaaacatcacctccagggcaaaatcacccttagttaagaaccactaacccatattaaccttccaatcaataaatcaatcagtcagaagttatgatttaattaatctatctgaagtttctatcaggaagacagggttgaaagcattatttgttttttttgaacaaattgcaatttttcttttttcagtccaggtgttctcctcctattcagttcccagaatcaaagcaatgcattttggaaagctcctagcagagagactttcagccctaaatctagactcaaggttcccagagatgacaaatggagaagaaaggccatcagagcaaatttgggggtttctcaaataaaataaaaataaaaacaaatactgtgtttcagaagcgccacctattggggaaaattgtaaaagaaaaatgaaaagatcaaataaccccctggatttgaatataattttttgtgttgtaatttttatttcgtttttgtataggttataattcacatggctcaaatattcagtgaaagctctccctccaccgccatcccctgctacccagtgaccctgttgccctcttcagagacaaattagtttctcttttttttttttttttttttttttttgagacagtctggctctgtcacccaggctgaaatgcagtggcaccatctcggctcactgcaacctctgcctcctgggttcaagcgattctcctgcctcagcctcccgggcagctgggattacaggcacacactaccacacctggctaatttttgtatttttagtagagacagggttttgctctgttggccaagctggtctcgaactcctgacctcaagtgatccgcccgcctcagcctcccaaagtgctgggattacaggtgtgagccaccatgcctggtcttaaaaccagtttcttatatatctctctggaggtattctaggcatatatgagcacattctcaagtacatattatcctcccttcccctatcttttagacaaatgatatcaaactatacatcttgtgagattattgcataccattatatgaagataccattatatcctttttaatgcaaccatattgtacaaatagactatgatttatttaacctgttatctatcagtggatatttaagttggtagttggttccaatcttttgctcttacaacaattctgcaatgactaacattgtataaatatcatttttaaaaataattgcattgaagcataatgtacatgccataaaatccacccatcttaagtgatttcacctgttctcagaaatttttagtaaatttaactaattgtacagccattaccataatccagctttaggacattttcttttttttcttttcttttcttttttttcttttttttttttttttgaagtggaatcttgctctgtggcccaggctggagtgcagtggcgcgatctcagctcactgcaacctccacctcctgggttcaagcgattctcttgccttggcctcccgagtagctgagactacaggcacatgccaccacgcccagctcattttttgtgtatttagtatttgtgtatctagtatttgtgtacttagtagagacagggtttcaccatgttggccaggctggtctccaattcctgacctcaggcgatccacccgccttgacctcccaaagtgctgggattacaggtgtgagccaccgcgccaggcccgtaactgtattttaatatagccattctatggatttaatatggtattttattatggccttaatttgcatttccctagatactaaccatgctgagtgtcctgtcttgtgtttattaaccattcatatatttttagtgaaatgtgtatcaaatcttttgcccatttttaagttgacttatttgtttgtcttcttactattgggttgcatatgtttttgatataagtcctttatcagatatatgatttggaaatattttctaccaatctgtggtttgtttttcttaatggtgtcttttgaagtgcaaaaggtttgaattttgaagtacattttattgattttttcttctatatattgtgcttttggtatcatgtctaataaatctttaccaaacccacagttacaaagattttctcctgtcttctttttatactttttacagctttatggttttagctctaacaataaatgtgattttgaacatacataagactatttgtaacaaacacaaataaattgaattgttgggcacttgtatttgcatttgtaattttattaactattgccaaatagcagttgtaaacacgtacacacacacaagtgtatatacacatatacatatatatacatatacatgtatgcatatatgcatatatacatatatgcatatatacacatatatacatatatacacatatacatatatgcatatatacacatatatacacatatacatatatgcatatatacacatatatacatatatacacatatacatatatgtatatatacacatatacgtatatgtgtatatatacacatatacgtatatgtatatatacatatatgtatatgtatatatacacatatacacatgtatatatacacatatacacatgtatatatacacatatgtatatatacacatatacacatatgtatatatacacatatacacatatatacacatatgtatatatacacatatacatatatgtatatatacacatatgtatatatacacatatacatatatgtatatatacacatatacatatatgtatatatacacatatacatatatgtatatatacacatatacacatatacacatacatatatgtgtatcta

SEQ ID NO: 565 - protein, 438 aa, Homo sapiens
MVCSQSWGRSSKQWEDPSQASKVCQRLNCGVPLSLGPFLVTYTPQSSIICYGQLGSFSNCSHSRNDMCHSLGLTCLEPQKTTPPTTRPPPTTTPEPTAPPRLQLVAQSGGQHCAGVVEFYSGSLGGTISYEAQDKTQDLENFLCNNLQCGSFLKHLPETEAGRAQDPGEPREHQPLPIQWKIQNSSCTSLEHCFRKIKPQKSGRVLALLCSGFQPKVQSRLVGGSSICEGTVEVRQGAQWAALCDSSSARSSLRWEEVCREQQCGSVNSYRVLDAGDPTSRGLFCPHQKLSQCHELWERNSYCKKVFVTCQDPNPAGLAAGTVASIILALVLLVVLLVVCGPLAYKKLVKKFRQKKQRQWIGPTGMNQNMSFHRNHTATVRSHAENPTASHVDNEYSQPPRNSHLSAYPALEGALHRSSMQPDNSSDSDYDLHGAQRL

SEQ ID NO: 566 - DNA, 3376 bp, Homo sapiens
  source 1..3376: mol_type = genomic DNA
gagtcttgctgatgctcccggctgaataaaccccttccttctttaacttggtgtctgaggggttttgtctgtggcttgtcctgctacatttcttggttccctgaccaggaagcaaagtgattaacggacagttgaggcagccccttaggcagcttaggcctgccttgtggagcatccccgcggggaactctggccagcttgagcgacacggatcctcagagcgctcccaggtaggcaattgccccagtggaatgcctcgtcagagcagtgcatggcaggcccctgtggaggatcaacgcagtggctgaacacagggaaggaactggcacttggagtccggacaactgaaacttgtcgcttcctgcctcggacggctcagctggtatgacccagatttccaggcaaggctcacccgttccaactcgaagtgccagggccagctggaggtctacctcaaggacggatggcacatggtttgcagccagagctggggccggagctccaagcagtgggaggaccccagtcaagcgtcaaaagtctgccagcggctgaactgtggggtgcccttaagccttggccccttccttgtcacctacacacctcagagctcaatcatctgctacggacaactgggctccttctccaactgcagccacagcagaaatgacatgtgtcactctctgggcctgacctgcttagaaccccagaagacaacacctccaacgacaaggcccccgcccaccacaactccagagcccacagctcctcccaggctgcagctggtggcacagtctggcggccagcactgtgccggcgtggtggagttctacagcggcagcctggggggtaccatcagctatgaggcccaggacaagacccaggacctggagaacttcctctgcaacaacctccagtgtggctccttcttgaagcatctgccagagactgaggcaggcagagcccaagacccaggggagccacgggaacaccagcccttgccaatccaatggaagatccagaactcaagctgtacctccctggagcattgcttcaggaaaatcaagccccagaaaagtggccgagttcttgccctcctttgctcaggtttccagcccaaggtgcagagccgtctggtggggggcagcagcatctgtgaaggcaccgtggaggtgcgccagggggctcagtgggcagccctgtgtgacagctcttcagccaggagctcgctgcggtgggaggaggtgtgccgggagcagcagtgtggcagcgtcaactcctatcgagtgctggacgctggtgacccaacatcccgggggctcttctgtccccatcagaagctgtcccagtgccacgaactttgggagagaaattcctactgcaagaaggtgtttgtcacatgccaggatccaaaccccgcaggcctggccgcaggcacggtggcaagcatcatcctggccctggtgctcctggtggtgctgctggtcgtgtgcggcccccttgcctacaagaagctagtgaagaaattccgccagaagaagcagcgccagtggattggcccaacgggaatgaaccaaaacatgtctttccatcgcaaccacacggcaaccgtccgatcccatgctgagaaccccacagcctcccacgtggataacgaatacagccaacctcccaggaactcccacctgtcagcttatccagctctggaaggggctctgcatcgctcctccatgcagcctgacaactcctccgacagtgactatgatctgcatggggctcagaggctgtaaagaactgggatccatgagcaaaaagccgagagccagacctgtttgtcctgagaaaactgtccgctcttcacttgaaatcatgtccctatttctaccccggccagaacatggacagaggccagaagccttccggacaggcgctgctgccccgagtggcaggccagctcacactctgctgcacaacagctcggccgcccctccacttgtggaagctgtggtgggcagagccccaaaacaagcagccttccaactagagactcgggggtgtctgaagggggccccctttccctgcccgctggggagcggcgtctcagtgaaatcggctttctcctcagactctgtccctggtaaggagtgacaaggaagctcacagctgggcgagtgcattttgaatagttttttgtaagtagtgcttttcctccttcctgacaaatcgagcgctttggcctcttctgtgcagcatccacccctgcggatccctctggggaggacaggaaggggactcccggagacctctgcagccgtggtggtcagaggctgctcacctgagcacaaagacagctctgcacattcaccgcagctgccagccaggggtctgggtgggcaccaccctgacccacagcgtcaccccactccctctgtcttatgactcccctccccaaccccctcatctaaagacaccttcctttccactggctgtcaagcccacagggcaccagtgccacccagggcccggcacaaaggggcgcctagtaaaccttaaccaacttggttttttgcttcacccagcaattaaaagtcccaagctgaggtagtttcagtccatcacagttcatcttctaacccaagagtcagagatggggctggtcatgttcctttggtttgaataactcccttgacgaaaacagactcctctagtacttggagatcttggacgtacacctaatcccatggggcctcggcttccttaactgcaagtgagaagaggaggtctacccaggagcctcgggtctgatcaagggagaggccaggcgcagctcactgcggcggctccctaagaaggtgaagcaacatgggaacacatcctaagacaggtcctttctccacgccatttgatgctgtatctcctgggagcacaggcatcaatggtccaagccgcataataagtctggaagagcaaaagggagttactaggatatggggtgggctgctcccagaatctgctcagctttctgcccccaccaacaccctccaaccaggccttgccttctgagagcccccgtggccaagcccaggtcacagatcttcccccgaccatgctgggaatccagaaacagggaccccatttgtcttcccatatctggtggaggtgagggggctcctcaaaagggaactgagaggctgctcttagggagggcaaaggttcgggggcagccagtgtctcccatcagtgccttttttaataaaagctctttcatctatagtttggccaccatacagtggcctcaaagcaaccatggcctacttaaaaaccaaaccaaaaataaagagtttagttgaggagaaaaaaaaaaaaaaaaaaaaaaaaa

SEQ ID NO: 567 - DNA, 26564 bp, Homo sapiens
  source 1..26564: mol_type = genomic DNA
aacatggagatctctctctctctacacacacacacacacacacacacacacacacacacacacactggcacaagcccagcattcatggcgcagccatctcttgtacttgctagcaaaacaccacctgtggaaagtcagctcaaacttccaacctcatccctcacaaagggggaatggagggtttggttttggctttcactggagtctgcaacaagaactggcatcatgctgcccatttcccgcctctccccacccagacccctgcctcagggacgcctgtcctcagcccagccctcagctgcagccaggccttcagcctccgtaacccccgctcagggtccccaccccctgcagccctgtccctccaggatgcatggccttgtcctgtgtgggggtggccgagagcactgccccagccctgggtaccttgggcaggaagctggcagaggccagggctgccattcaaacaggggcaggtggttttgccaggaggaagttgacagttcaacttcaaacatgggtgacgcaggccccacactgcctgctccccgtcccacccctccctgagcacgccaccccgccctctccctctctgagagcgagatacccggccagacaccctcacctgcggtgcccagctgcccaggctgaggcaagagaaggccagaaaccatgcccatggggtctctgcaaccgctggccaccttgtacctgctggggatgctgggtgagtacccctcccaggtgtcctgcgaacacccgggctcgctccagtgcaaggaaggagttcccagttttacccaaggctgactctgggatccacatgtcagccctctggagcgttgtggagatttggggccactgggatccctgcctgcccccactaagccgcagcttggccctctgtcctgcatgtcccacccgccaggagcacaaccttgcctctctcatgcgctgttgagaaccctgctttacccttccagtgcaagagagactgcaggggggacccgcatttgatggggcccagacaacttgattcctaggctgagttggattttagcagagcattcaggcctccctctgcgaggtcccccactgacagcccagcctttacttggtcgcctccagagacatggaaactcgccgtctccgaggcagctctgatgatgctctggacagacagtgggccgaggcagggtggagccgcctctgaggacgatgtctgagcaaatgtcaaggactcatagcggaagtcctaggccctctcatgcccagtcctgggtcagtcccagaggggcccagccaggccggctgggatgagtacacgctgggcctgctctcactccagccctgggttgtaagcccaaccctgtgtgacctcggataggtccccaagcctctccaggccttgatctccccatttatgaaatgtgggggttgggggtgtgaactggatgaggcctgacccacttcctgaggatttagaaggtctggcagggtgacagaggtgcgtgactctgggctggaaacaggaggatgcgagcagcttccaggctggcagggagagggtccggaggccttgcctgcctgagcagggagcctcagcagccttctagggaaaccgggtgtgcaggtgtgagtgtgggggaatgcatgtgtgtgtgtctgtgtgcatgtgtgtgagaactgtgtgtgggggaatgtgtgagtctatgtgtgtctgtgtgagtctgtgtgtacgtgtgtgagaactgtgttggggggtaatgtgtgactctgtgtgtgagtctgtgtgtgagtctctgggcatgtgtgtgagtactgtgtgtaggggaatgtgtgagtctgtgtgtgagtctgtgtgtgagtctctgggcatgtgtgtgagtactgtctgggggggaatgtgtgagtctgtgtgtgagtctctgggcatgtgtgtgagtactgtgtgggggggaatgtgtgagtctgtgtgtgagtctgtgtgtgagtctctgggcatgtgtgtgagtactgtgtgtggggggggaatgtgtgactctgtgtgtgagtctctgggcatgtgtgtgagtattttgtgggggggaaagtgtgagtctgtgcgtgtgagtctgtgtgtgagtctgtgttcatgtgtgtgagaactgtgtatgggggaatgtgtgagtctgtgtgtgagtctgtgtgtgagtctctgggcatgtgtgtgagtactgtgtggggggaatgtgtgagtctgtgtgtgagtctgtgtgtgagtctgtgtgtgggagtctgtgcgcatgtgtgtgagaactgtgtgtgtgtgctttcatgagcacaatgcggcctccaaaggcaggattatctccccaacacatgtgacaatggcacctgtgcacacatgttcacatggttcttctcacatgtaacaacaacaggtacaaaatgccttctgtcccaaagtaagaggcctgagacagacctctggctggcttcagggaccctgctaaggagggaccaggcccttaaaccccccacctgctcctcacctctggcctcagacttcattgagatagggcggctcccagctgagtatgggaacccgtgtcctgctctagggccctcccaactgaatcccatcatgggtgaggctcctgatggcaccaggcaagtcccctggcccaacacaggccacagtcaggaagacttggaggtagccccttcaccccagtatggggacctccttgaaccccaggaatactcagttcccagtgtctgagtgagccggtgggtaccaagcattccctttgttcagtgggtaacggtttacaaagcacttttaaagccattttctgctgcaagcttcacaacagccaatgaagtaggtgggcccattggccccattttacagtggggaaaagcgaggcccaggaaggccgagtgcaaacccagggtgcagcagctggtgcacagccgagctgaccccagcccagcattcctgccttcacagaggcccctcccttagctaaaagggaaggccaccaaaggcacttccgtgtgcaggaaaatggccctgggacacaacctccaccagcagagatacagccaccagagctggggacaccaagggccagggttgctggagtcaaacagtgcaggcaccctttgagccattccaaggagagaggcagcaatgccagagccctggggacaccacagcctcctggctggcatcggggcttggggacctttggatcctgaggcatgaagatgcccccagcaggcctgggtgctagtgacaggccagggcttcccacagttgctcccctctcagccccagcctgcctggacagctgctggcagtgaggcggggaagcggctctaacacaaactgcacgtccctgactggcctagccgatgcgactctgaaagccagcactgggacgtgggaaagtcatggactctgcagtttgaattccagtctgccacttaccaactgggcgaccttggactagttctgtaagcctcagttttctcatccgtaaactgggtgcaacagtacctcatagaggcttataaggattcaatgaatcaatgcacacagagcttaagtacaatcctggcatatagtatagtaagtactcaataaacaataataacagcaacaactatgattattattattaccagggtcagcaagaaacaatgcgaggtaggagccaatggggaggagggtcttgccagaggcctgcacagccgtcaatctctctacccctcaatcctcttgcacaggctatttattcactaattcattcatttttcatctacaaatattattgagcatctcctgtgcatccagctctgtgcaaaacactggggatacagggaccaaggcaggagtccctgccctcaaggatttgatcagctaacaggagagctgttagagaacacaagtaaacaagcaccaaagaccgggcatggtggctcatgcctgtaatcccagcacttcgggaggccaagacgggtggatcacctgaggtcagaagttcaagaccagcctggccaacatggtgaaacctcatctctactaaaaatacaaaaattagccgggagtggtggcacgcacctgtaatgccagctactcaggaggctgaggcaggagaaccgcttgaacctgggaggcggaggttgcggtgagccgagatcgcgccattgcactccagcctgggcaacagagcaagactccatctcaaaaaaaaaaaaaaaaaaaaggcacccgaaatatttacacattttgaaatactgagtgcaatgaggagaacagcaagttcctcaggcacaatacagtctgcactaggataggaggacatccctttggctgggcaggcagggagggcctctctaaggaggcgaggtctcatctgagaatccgagacctgaatgagggacggagccagccaggcagagaaaaaagggaagagggtcccaggcagagcggatggcagggcaaaggcaagggggaaggacaggcctgagagggtggggctcctactgggagcagggcagcaggcccactgtcccaggctgggcgaggccctggttggatcatcctcctcgaagacccagagctccccacctccagcagggaatgaagggacctgggggcccaggaagggacctggccttcctgggtcactctgtcaccatcagttcagaggggttttccctgcagtgaccaggcggcgaattcagctcaacctgacaaaattgattgaacatctattctgtgtgtgtgtgtgaaattgaacatctactgtgtgtgtgtgtgtccatgtgctgtgtttgcgtatgaacacatatgtgcacagccctgtggaggggagctttggagcaatgcagacctagtttgatttctgcttggccacccacaagtgaacatctctcagggtctcatctataaaaataggggttccttgctgtgtccacctcaaaagatcactgcaataattacatcgggtttattcagagactaggtatggattgaacacctactatgtgccagatgctgttctaagtgctgaggacacagcagtgaacaaaacggtggaaaatccctgccctggtggatctggcataatagtcagggtgtgatggggagacaaacaagacacaagctaagctagtgattatgcgaatactagacggtcatgagaggtgtggagacagacagatagaggagggctgggaccggaagccttggtggggtgtgaggtacctggggaggattcagcggctctcatgagaagatgatatttgagtcaatatttgaaagaagggagtgagcccaccgtgtgggacctgaggagaagcgttgcaggcagaggggcctccagctgcaggtcagtgggggatcgatgaggcagccacgagggccacggatgcccccgtgaggacttgggctttttctcccatgcactggacagccacacaggagcagagaggtgagcataactctcacctctccaggtcctcaagtgcatcttgaaccccaggccagatgcatttggaactccagaagctttcagattgtagaaggaaatactgtgtacatactgtgtgctcttaacacacgcagtgaggcctggggcagcaccctgcgttcaacacattcccatttctgcagtgaaacatgaatttgcacacttagagggatgtaaagacagcaaacaccctcccaccaaatgcattagaacaagacttttagattctggattttgaattgcagataagagactgtgggcctggatcacttcttctatagctaccactatcaccgtgaccagcatcatcatcaccatcatgtacctttcaaggcctgactttcatggtgtccagagggaccctaatactcctctccgggggacagatacggtaggaatagcgtaggaaatgggtggtggcagtctgcagagacgacaagggtcccatgcactgccacagattcccacagagacatctggaatgaacccctccctccttctggccccagtttcccccatctgtactccagagcaagcaggctctggggcctccctggggtagactcccacaggccctgtcaggtgatggagacagggtttctctcctgactctaccaccagctagctgtgtgaccttgggcaagtcactcagcctctctgaacctcggtttcctgatctgaaaatggaggtgagcatggtcccttcttcacagggctgtgggtagaaagaacaagtctagtgcatgagagagctttggggtaggtaaagctctaaacaaaaccaaagccttgtctctgtgacagcagagacaccgtatatggtgcgaaactcatgcaacagcagactactagtgggagagagaaataacaattcaaacagcaaaggtcattctgcccacgacccactgtccgctcactgggacaggccctgggtgagccagattagagacctgaatctgctgttccttcctgcgggctccattcccaggcctctcctggtgtaagcccagtgtgactctatatgtgttttgcacataaaagccgcctaatcataaaccaatcatttcatctgtgctcaacccaagaaagggaattttggtcctttacgaccttcgtttccctaaagccctgatacagctccaactctacagatgactgtcgtttcagaaaagaggggcttctgacctttcaagtcagccaacatataggattcgaggaaggaaaatccagaatcctacccaaaacacaggcagatctattgtatttcatggacatcgatggctgtagctatggggaggtctgtggactgttagaaggaatcactgtttacgggaaaaagggaacacctgacttgcaaactacactaaatcagtcataggtgttttatctgtggaacaaagtggtgatagcaccccgtcttctgaggctctagaaagaaatggggtcttctgtgaaaaatccttgtcctggggtctgcacagggtaaggatgctgtcattttattatcatcggtcattatcacaggcctgtgaatccgggtgcctgccaaaccctaagcaggccacacccttgcctccatttcccagggtgcaggggcggcaggacctaggagtgagccagaggcaggggccaggagtgcaggttacaaagccagccgccctgggctgaattctggccctgccgagttctcactcccatgcaccacgacagcctcctcctctgtaaactgggacccatcatgcaagtcaacaaatattcatctgtaattccaaagcccaaaaaacatttgtaagtttctggcaaatgcatttggtgcaaatcctgacctgaacgaatgggaggctatttataatcttgacacatcccccttagtgtgaaactgcatatgtttcgctgcagacactgccatgtgtttgaagccaggtctctccacacacatggcgaccgtaaggtgccagcgaggcgtggacgaaacagaagtcaagggccaccgccactgcctggggcctccagagatgcagccagtggagccaggatgtcctatttttcaaaaacgcctggatcttgaaatgtgtttaaaaagcaaaacaaaattaaaagaaacctttttttttttaatttggctcaaaaaatttttaaacactgtgcagagcaaataaaactcatgggatgccgtaatgagagccaaagtgagaattatcctgaatactgtgggggcaagaggaatgagagggacagggaggaggatatcctcaccaagacctcagggcaggcagggccaaaaatattgtctctgccaatgcaaagacaagagacgggagctccaggggtgtgataagccgtctgacttctttagccctgaattttgcctgggtttgcccagtccaggccctaaattgtgggagctgcaaggggaggtgggcaggagaaggaaggggtcttcagagaattctcatccgtagccccagttgctcggggtgaggggtggctggcggataaggaaacggcatagcacttccaggcctcgggggcctcctggtctggagtctcggggattctgtccacagttttggcaatagcaggagcctcaggcttcatgaggctaggaaggatggtgcaggagtaagctgtagagcccccagagggggtcagggagaccctgaacacagaccgcagggctcaggggatggagggtgctggtctgacccctgtgagaagcaactaaaaaatagaaataggttatggaccctcaaaacctcaatgttcattctgctccctagattataagtgaaaaacaaacaagcaaataaaaaaaaaacctgaacatattcatggacaggctgaaagaatatacacaacacactcaggaagcttccaagtcagctgtacatctcaccgccctccctccaccagctgctgaaatccatcaggagctaaagattatagatcacaggtgtttgaaccagggggaaggtgagggactgtggaatctaacttccttactttacagattaagaaactgagcccagagaggctgagtggcttgccaaggtcacacagcacttcatagctaagtcttctcactgcatgttttactgactgaacggaatcacaagttcattccctttgatcaggattgcacaccagggtggtgcaggaatcaatgaaacctggggcaggccatcatgggcttcctgctggagggaagggaggcagtttgggcctcactggcaaaagctcaagactcagtgccaggcggctaggtttgagttcgggccccagcactcattagctgcttggacaagtcatttaacccctctcaagtttcctggtctgtaaaatcgggaccaaaataatagcacctacttcatagcactgtggtgaggactgggagagttaatgtgtaaaaggcccggaagagtgaaaacttttaaagtgttggtgatggtgacagtgatggtgatgatgatggtgacggtgatggtgatgatgatggtgacggtgatagagatggaaggagaggagaggaactgctgctcatctggggaccagacaggcacccagaggaaggttccagggcgacactctagaatgcataaatatcttttttattaaagcatttgttagagcattttttaaagaatttcacttggttctccagcttgttcagtctttcctgagaatgttctctgagcaagacctaggctgttctgtgtggaatctgccaagattgtcaggcccagtccctgtccccaggccttcagggtctggctgcacgagcgcttccaggtcagacccaggtggtgttcatctctgcatctccaaagctggcactctggaggagcaattgggtggctgggagcagagagcatgggttttggagtcagacacatggttcgactccacctgccagccatattacccgggacagggcatttgccctctcctgacatttataccaggaacgtactcaactctcgtgatggggctgtgtggaagattaacaacaatatctgtgatgaaccataccgtgggctaagtatgcagcaggtgctcaacagttggcagctgctgttaataatgaacgttgagtatgatgactcgggaaatagagatgctccttgacctacagtggggttgcctctcaataaacccattgtaagctgaaaacatcctaagtcaaaaattcatttaataccccgacaaacccattgcaaacttgaaaagtcgtaagttgaaccaccctaagtctggaccatctgcgcgaagtttccaagttaggagaaggaagtggtgagccccatggcttggctctctgtgctcctggacagggaatcttcccactgggaaagctccccgagggtctgctgccctgggcacagcttcccccagcccaccctactccacagatcagtagcaccagctctgagcactaggccaggaagcactgggctaagccctttacaccgattagctcatctcatcttcacaacggctctagaaagctagtcccatgctcatcctcatgctatgagtgaggaaatcgtggcttggaggcacagagacaggacagacgtgctccccagactctataggcaggaagtggcagagctgatactcagaactggagcagtagaaagtcatcggtgactgaaaacccatcctgagctgtgtagcactgaagggcagatatttggactcccactccccacaggtggcacttcaagctgccttagccctcgagacttagccagagggatgactccttcaaggcagactgccctgctcctgatgggcagctgggatgagagggaggtgggaatgagaggtcaggagtgagaggtgagggcaggacaaaagggcctccttcctgatttctctcgctagctggacatctccctgatggcctcctgaggctgccctgcccactgcaatagatcagatgattggctgggcgcggtggctcatgcttgtaatcccagcactttgggaggctgaggggggtggatcacctgaggtcaggagttcaagaccagcctggccaacatggtgaaacctcatctctactaaaagtacaaaaattagtcgggcgtggtggtgcatgtctgtagtcccagctactcgggaggttgaggcaggagaattgcttgaaccagggaggcagtggttatagtgagccaagatcatgccactgcattccagactgggcaagagaggaagactctgtttcaaaaaaaaaagaaaaaattgatcagacgattgacaactagaccatccttttccacccaggccagagctctgtacacttccctgttggtgagaataaccttccccttccaaggcccgtgactcctagagcaacagccacgaaaggatcttgcagattcaggggaaacttatcacatggccatgatgacttcattacaaagagtcttgattcggggacaaggatgaactgtggagcacatcaccccttaaaattcaaccgccagcttgagaacactcaagcaagaacagctttttcaaagcacacctattttttaagagacggggtcttgctatgttgtccaggctggactcgaactccttggctcaagtgatcttcctgcctcagcctgctgagtagctgggactacggccttgagccattggcccagctaaacacacctattttttaacaccaagcaaaaatttctcacaaacaatttgaacacagcctttcactattaatatataaagcagtctccttgacccagtgccgtaaatccaagagtaaacccaagtcggacagatggaaatcaaaataccgtacttgcacctaactgatcacgctaggtggtgaatacagaggttaagctttgaagccacgtgagcttgctacttcacctcgtccccacccaaattaaacctcttccccagccacagatgagctgctctgctgagagccccgcaatgggcaactttgcccccactccacagtgagaccaggctacaaggaggcagagcttccacgtggtccacatgggggaaggctggttccctgcagacccgtgttccctgggcctgtcgccttggctcccttgtcaactagctggctacactactgtgggcaggtcacgccatctctttgagcttggtcttctccagaaatgggcagctgttaaagataagtggctgtcattcttatcctgccttgggaatgctagaaagtagcaaatgttctcttggttccctttcttgctcatttctttctttccttttttttttcttgtaaagacagaatctcactctctcacccagtctggagtatagtggtgcaatctcagctcactgcagcctccacctcccaggttcaagcaattctcctgcctcagcctccagaggagctgggattacaggcatgcatcaccacgccgagctaatttttgttatttttagtagagacagggtttcaccatattggctaggccagtctcaaactcctgacctcaagtgatccccccacctcggcctcccaaagtgcttggattataggcatgggccaccgtgcccggcccctttctggatcatttctccattctctagaactaaggagctcaaacttttttgagtggaaacatgcgggacatttttacattgcaacccccaacacacaaaaagtgatcagtgcattctgacattctcttttttatttatttaaaacaaaacaaacaaaaaaaaacagggtcttactctgtcacccagctagagtgctgtggcataatcatagctcactgcagggtccaacttctgggctcaagcggtcctcccaccttggcccccttaagtgctgggattgcagtcataagccaccgtgcacggcctctctattctactccatttcatttttaaaaaaattgatggcctgagtgctgtggctcacacatgtgaatcccagcacttcaggaagctgatgcacgaggatcacttgagcccaggagttcaaaaccagcctggacaacatagtgagaccccatctctacatacacacacacatacatgcatacatacatacatacacacatacatagtaaaaaaattagccaggcatagtggctcatgcctgtaatcctagctactcaagaggctgaggtgggaggattctttgagccagggaggttgaggctgcagtgagctgtgatcatgccactgcactccagcctgggtgaggagagtgatatcctgtctcaaaaagtaataataataataattgatggttacattattacaaaggttagcatgagggaatttgaggtagggagtaatggaactggtgtataccttgattgtgatggtggtcacacacatctatatatgtgacattcacggaatcatgcagtaaagaaaaatcaatttcacgtctgttcattttaaaagtaacgttttttaagaagaaaaaaaatcgatagttgcagcccactagatagaattcatatcactcaggggttccaacctggagtatgaaaattcctgtccctaaaacccatgatagtggatagggggaggcagaaagggccattgctcgggctgtgggtgggtgagctggggagaagggagagagtgggaggtttcacttcctgaccctcctctcttctttctgcagtcgcttcctgcctcggacggctcagctggtatgacccaggtaaggaagagccacatggagaaaggcctggggcagggggagagtggggctgtggtttcatcaggccatcggggacctctcgatgaagccatcacttctgccagagtgaaccccaccctatagagagagtgaaccccagcatacacacaggcacatagatgcagacactgcacattaagatgctcacatgcaggtgggtgccctcgacagccgtaaatcacccacaaatgccagatctcatgataattattatgacccgctcaccatgcacagaagacatcccagctcataaatgtaccttgcaaagtcttatttcccacccaatcctgacagatgctccatggtcaaagatgtttagagcggagtctgcagagagaggccgcagactgatggtaaagtgtgtggaacgtccagccttagacgttggagtttagtcgtagaggctgtttcccaaatagggttccatggagcatgttggacaaagggcaggcaacaccgcatctcccactgaagactgacagtgtacaccggcccagtaaaggatctgagaaatcctgcagcgaagaaatacatgacactttttaacccagcactttgcacccttatttcaccacagacctctccttcacattgactgggataacatcgtgctgaatgtacctggggagaattgtggctgaagggtcttgagatgccactgtgcagccagagggggtgacaggggccttggcaggccctaagcacgatctgggccctgcactgacatcctagctccaagctttggcacactgcttgacctcttgagcccgtttccccagctgtgaaatgggaagaaaatctcttgcctggtgaagcggcaacgagccagctcgctgggcggacagcctgcaaatcaccccaccaatgttaggtgttgagacgcgctcgttctccctctaaccagccaagtgcccttggcgagccctggccctgagctttggccccagagtgtcctcgtcggaagaaaagggtagcctgacccgtggttcccgaccagggaaaacctccccctcagaatcacctgggagagcctttcacatttctaaaaatttcttgaatcagtgacacattcatccagctcaaaaatttaaaaaaatataaaaagatctgtagtgaagagtctcacttccatctctattcccgtctatcccagtcgcccccgacgtcgaccccaacaccccaggtaatgactacgtttatttgtttcttgcatattcttcaaggagctctttatgcaaatacacacacacacaccccacacagaccccacacacacaccacacatacacacaaccacaccacacacacacaccaccacaaacaccacacacacaccgcacaccacatacacaccccacacacaccaccacaccacacacacacaccaccacacacacaccccacaccacacacacacaccacacacaccacacacacaccacacacaccacatgcacactacacaccacacaccacacacataccacacacacaccacacacaccacacacaccccacacacaccacacacaccacacacacacactacacacaccacatacacaccacacacaccacatgcacactatacacaccacacacacaccacatacaccacacacacaccacacacaccacgcaccaccacacacacacaccacctgcacactacacacaccacacacacatacaacacacacaacacacacaccaccacacacacatcacacacaccacacacactacaccacacagacacacacaccacacacacacatatatttttcccctcatggagtttgataaaatcacacaagacacatgtctacccatgacccagcaattccattcctaggtatttacccaagagaaatggaaacgcccacacaaagacctgtatgtgaatgttcacagcagccttattcatagtaggcaaaacccggaaacaaatcaaatggtgaatggaaaacaaattggcatgtccgtgtagtgaactatcattcggcaataaaaaggaatgaactacttatgcgtccagtgacatagctaaatctcaaatacatgctaagcgaaaaaagccaaatcaaacaaaataaaatccatgctgtatgagtccatgtctatgacattgtagcacaggcaaaactcatcttttgtgacaaaaagcagatcagtgtttgcctgaggctagattcagggaaattaactataaaggggccttagggaactttctagatgatggaaatgttccatatctagattatggtggtggttacatgcatgtatacatttgtcaaattccatcgaacagtatccttaaaatgagtgcatttcactgtatgtaaaattacctcaataaaattttttttttttgagatggaatcttgatctgttacccaggctggagtgcagtggcgcgatcttggctcactgcaacctctgcctcccgggttcaagcaattctcctgcctcagcctcccgagtagctaggattacaggcgcctgccaccacacccagctaatttttggtattttttctttttttagtagagatggggtttcaccatgttggccaggctggtctcaaactcctgacctcaggtgatctgcccgcctcagcttcccaaagtgctgggattacaggcatgagccaccacacctggcctaaaattaatttttaaagatctcttaaaaagcagacaccagccccaatctcagaccccttgagacagaatttccaggacaggggccatcctgctggacagtgggtgccgagaacaccttgcccatttatctgagctcccttctgactctgaaatctggagccccaccctcctgggtctagcttcggggctgcctgggtcagggtcctctgggaagcccctgcagtgccccagaagggacgaagctcacaaggggcaaggcaggcagcccacggggcaggagggagctcaactgggcgtcctagggagagggcagtgaggggtgccagtggggaacccctcccagcctgacccccaccacacctttctgacccccagatttccaggcaaggctcacccgttccaactcgaagtgccagggccagctggaggtctacctcaaggacggatggcacatggtttgcagccagagctggggccggagctccaagcagtgggaggaccccagtcaagcgtcaaaagtctgccagcggctgaactgtggggtgcccttaagccttggccccttccttgtcacctacacacctcagagctcaatcatctgctacggacaactgggctccttctccaactgcagccacagcagaaatgacatgtgtcactctctgggcctgacctgcttaggtgggtaactagccagccacacgggcaccctgggcctgggcgccagccccgaggagactgcccgaggcctgtgatctagggtctgagcaggctggtggaaggggtggggggaccccagtttataaccactccccaagacacatacccaggagggggactggaaggggccagcacccatctgtaggatggcaatggaggacctagttctgccaatcactgacttcatcgtcgcctctgaacctccattctcccatctgtgaagtggggtggtacttcccgcctcgcaggaggcttagagacaacgtgtgggtcaagtggacctggtgtgccaagcggcactcatgccaggagctcctggtcctctcaaggctgctggctgcccccggccctccccacaccacccattcctccctcaccagagtgtctcattgcagaaccccagaagacaacacctccaacgacaaggcccccgcccaccacaactccagagcccacaggtaagaggattctgaaccccccacagggagtcagagctagcaaataaaaacccaggatgcccagttacattggaatttctgacaaaggtggaaatgtttagtattggtgtgttctacgcaatatttgggaccccatcacctcccaaggctaagcgttagtcagtagttgtccacaagttggggccaaacagcaaggagtgcccaggaagccctcggcgctcagggtggctccccctcctgctctctcctctcctagctcctcccaggctgcagctggtggcacagtctggcggccagcactgtgccggcgtggtggagttctacagcggcagcctggggggtaccatcagctatgaggcccaggacaagacccaggacctggagaacttcctctgcaacaacctccagtgtggctccttcttgaagcatctgccagagactgaggcaggcagagcccaagacccaggggagccacgggaacaccagcccttgccaatccaatggaagatccagaactcaagctgtacctccctggagcattgcttcaggaaaatcaagccccagaaaagtggccgagttcttgccctcctttgctcaggtaagtgagacctggccaagccccatgacaccttctgctgccctaggtggggtcacagagcatcccagaaggtcagggaacatgtgtgcagcacagggcactatggagaatacaagggaagtggaggcctggtcttggcctctaagaggtaacaagggttggggtggggaggatgcatccacactcaatgccttggtaatctctgcaaagctacacaccccaagcccaaaggaaccgctggctcagctgccacatggggaaggggagtcggcaggacttccaggaggaggcaaggtctcttcgtgggtctgggggagaaaaaaaaatgtctaggtaggaattatggcttgtgccaaagatggggcacttggaggggtgggccttgcaggaagggcatttgtaaatcccaagagttggcattgcagcaatggtgagaggtgggaggtccctgaggcccgggagtcagaggacagcaggcaaagagagaaacagagacagcccccaagagggctctgcagagggtcctgcgccgtgtgctgacaaggtaaagagaatgatgccgctgtgtggttgaggggaggaggcaggtgagactgagtctgtgagaccccggtgggccaaaccaggatcaatgaagaaaactaaagggaagaaaccacagctgaaacgaagggagaaacggagaaacttcgcagtacgcctccctccggaagtagtgggttcccatggccggaagtgttctcagtgaagtccacactgtacttaccgagagcttacttcatgcagggaccattcctggacattctaaatttttcacatggccttaggaggtgggtgttattattatcatccctttttacagtgaggaggctgaggtttagagaggctaaacctctcgcccagtactatggagcacttgctgggatttctgttcaagcagggtcactctagagcctgttatctgagccttggtgactcagtgtggtcctggaacagcagcagctggttagaaatgcaggtgctcaggccccagcctggaccttccgaatcagaatccacttttcagcaaggtcctcagtgatttatgtgcacaaatctaggaatcactgctcggggccacctggctgtcctgcaagcacgctgggtacctggtgtaaattagtaaaatgctgcccctcccccagcagaagcagctcccaaggggctcttggcctgatgaggagagcaggggctggctcgcagtcccaccggcccctcagctactatccttcctgcaggctacaacctgtaaaaccatacccagggttcttgcctttgaagcttcttctaaatagatttactagggctttgaaggtggatgttgctatgggaactgggcaaagctggtgagatcacaactctctctaaactgagcatgtgtgggcctcagctacagactcccaggccccaccctggcaggcagaaataaatgtgtgcctctgttgagccaggccccacttgctgaaagcctggccctcagcgttcagtgcctgggcagcacgatctgtcccaactgtgaactgccaggactcagggcagtaggtctttccaacccccaggcctcagtttccctcttctgaaaagtcctccttcttcccaaagtgcagcgggataatgacaagatgtttccaagtgagaagtggacctaggtggagcctatttcccacgctcttctcttatctccacctggcatggagccgactccctgctggtggctgccaacagcctccctgcagaaagcgcctatgctgctgtgtctcaggatggtgctggcagctgcccagaggcaccagagacagtgctgggtcaggggaagagccacagagggtgccagaaggagggaagggcagaaaagaaggctgcctctcctggtggtcccacacagtgccttcccctagccagggccccgatttgccagtggcatggggccccaggaagcagcacacaggctcaggttcacacttgcaccctcctttcccattgcttcccctctcaggtttccagcccaaggtgcagagccgtctggtggggggcagcagcatctgtgaaggcaccgtggaggtgcgccagggggctcagtgggcagccctgtgtgacagctcttcagccaggagctcgctgcggtgggaggaggtgtgccgggagcagcagtgtggcagcgtcaactcctatcgagtgctggacgctggtgacccaacatcccgggggctcttctgtccccatcagaagctgtcccagtgccacgaactttgggagagaaattcctactgcaagaaggtgtttgtcacatgtgagttggccacagcccacagtgggtggaagcagttactactttacctctaggacccggtcagggtgcatgtctctaaagggaagccctggggagctagacagagagtcccagagacccagaaaggatggagacagggaaattggaaggctagggagcaagagtactcagacagcaatgggcatgaacaataataggagacagggcaagcaacaggcagatcactgtcaggcagctgatgagtcatagaacttctccttctaccttctacttttgcaaggtggaagccagaaaatcaaatggtagatagcacatatttgctacatgaatggtaactaaacgggaagtaaaagagagaaatggatggatggatggatggatggattggtgggtgggtgggtgggtgggtggatggatggatggatggatggatggatggatggatggatcggtgggtgggtggatggatgatggatggatggatggatggatggatggatggatggatggatggatcagtgggtgggtggatggatggatggttggatggatggatggatgagtggactgatggatgggtgagtggatggatggatggatggatggacagaagggcggatggacagatggatggatggatcaagaatagaggccccgctggctattggtatgcaatcatatattggtttctgatggtatatgatggcaaggtgatcactaataactggcaaatggtagaaaattaaatagcttataacaagtgtggcaaatgatagctagatgatcaactgttagatgacaaatggtgggtgggtgagtgggtagcagggaatcctagagatagatggagggatagccaaatagatcattgccttccgtgcatgctggtgaatttctcagatgagcaaggatgacggcggaagccaggcagccagcagcttccctcccacagtttttctccccccaggactgggactgacctaactcttcctccttccccaggccaggatccaaaccccgcaggcctggccgcaggcacggtggcaagcatcatcctggccctggtgctcctggtggtgctgctggtcgtgtgcggcccccttgcctacaagaagctagtgaagaaatgtaggtgtcacggccctgagtggctccgttcccacgtgcagagactggaggggctgcactagagtcctccggaggaggggtcatgcctccagagagctgggcacgcaggacacctctgcttcaccacccagccttcccctctcctgcccattagccattttctgccccaagtaacagaaacacaaagtaaacaaaattgcaattgctgatttgtccatctctggagcccagctgagacccactccaggtcagagagaaggtgtggccattcccaaggctgtggcaggcccagagggtgttcagtacagcctctgatggtaggagacacacatcccaggcctagccccaccacttaccactgcccaagatgctgattgggacacttcctctctctgaccctcagtttcttcatctaccaaatgggcaatcgcacaccttgtgaacgcggggggttgttctccttgccttgcagaacttaagaggaaattattcagacaaagaagtgagaggggagagattgggaacagagggcccagcaggacagtgttaggtcctagtgcctgcccaggtctagttctaaacgcctgtggtcttttctcctggggagccgggcacctctacaccatcctcggcctgctccttcggcacaggatggctgcaattcccttcccgagcaagttaggaaactgaggcctacgagagactccagggggcagagcccagcagccctgccctcagctgcacctgccgccaccatctccctcccaggcccagccccatccccacccctgcctgcccccacccatacctgcccccaccactctgatgtgcctttcttgtctcttgcccagtccgccagaagaagcagcgccagtggattggcccaacgggaatgaaccaaaacagtaagtgtccccggaggcaggagcctccctcaggccctggacagaggccatggaggcagagtcgaggctctctgctgaccacagacggagcctgtggctgcttgaagcctctgatctccacggtgcttgtctgacatgtgactgtggccaacagacgtccccacaccagggagggcggaggcttcttgatgggctgatggctgagcggtttctaccgctgaagcctcagagtgtagaaacatctcatggtatcctttctgtccctcgccccatctctagggtccccagcagccctcacctcctccagcagtattccccaacacagtagccagtggatgttaacaggcagcactcacaagaggcctccctgatcaacagatctggaaaaccatgagttaggcacagctaagcatagctatttcaggacttatcagaaccttaatgggcatttttgtattgcccatctccaaagcaaggatccattaagaagggctgtccaagttattttcatcatggaacaacttacagggccagtattaggacattttggtgcagccagcccaacaccatccctggtcttcatcctccctccttccagccacagtcagagacaccctaatggatggagacatggcgctcttcctgcctcccattctgccttcttcccccttcccaagtccacagccaaatccttcaagagggctctgttgaatttgttattaagaaaggctctggaaactttcttaataacatacaggccctcagctcctggagggcagggagcagatctgtcccgtcacctgtgctccagtctcctgcttggtaaatgcttgatgaccgactcacggaaggccccaccctgccagtcagattgctgggttacccaaacctgctctaaaagtctgctgctgatcctgctagcatgaacctcccaggaagaaaggagagggggatgcattgaaggggctgtgggtgcctttgtcctctccccgctaacatcatgggaataggagattaaagttctgggcacctgctggggaaggagacggaggacacagccacaagtctgacactgtctcctaccatctgcccagtgtctttccatcgcaaccacacggcaaccgtccgatcccatgctgagaaccccacagcctcccacgtggataacgaatacagccaacctcccaggaactcccacctgtcagcttatccaggtaagcaccagcgggtgctcccaggcacgcaggcagggctgcagcaggccgccaaggcaggtcacgtgatgcccttgaaggtcgggtgatggcccaaagacagaatggagaccccagggtgcaaggggatcaaacatcgcaggatgcagcaggggtacggaagggatatagcctttgcaggccccagctgtcccgtttgagaccacaaactactcatctggagagaagaatgcactcagaaagccatcaaccccagccttgctgtgacctaatgggcctgtttcccttcagggccttgaggggcctggatggtaaatgaggccccttggattcctccgggctagaagagagccattaagtgggctgcaggagcgctgtactaaaggctcccagactggcactaccaattaagccccagggagcctggagttcagcatcattagtgaacgtttggctgatttgatcaaaacagataaggggttgtcaccggctcataaagcccctgtgatcttccaacccactgtgggcagcggctctaggatccaaggggctctgtggagtcaaaaaccctctgcaaacagcgtcctttctttccccagctctggaaggggctctgcatcgctcctccatgcagcctgacaactcctccgacagtgactatgatctgcatggggctcagaggctgtaaaggtgagcccgtctccagcctgaccccagcaccccagggtcccccacagtcctgggggtgagcagcagccactcaatgcctcccctcagtcccaccctgcccatacatgaataggggacccccagcatcttgattcttgtaaagggaaagacaaacgtcagctgtttaggttatacgagctgatttgacaattagagcagagcaatcatgaactttaacaatcaactcttaaactccattcggaaggccacacaggcagagtccctaagagctccgtgatggagtcacacccctctagagctgccaacctgccagcgggcagaaggagcccctggctcaggacagcagccgtccccaagatggagcccagagcatgggtcctgtccccgacctccctgcatcacctctgcggtgtcttcctctaacacgtttccttctcaccccacagaactgggatccatgagcaaaaagccgagagccagacctgtttgtcctgagaaaactgtccgctcttcacttgaaatcatgtccctatttctaccccggccagaacatggacagaggccagaagccttccggacaggcgctgctgccccgagtggcaggccagctcacactctgctgcacaacagctcggccgcccctccacttgtggaagctgtggtgggcagagccccaaaacaagcagccttccaactagagactcgggggtgtctgaagggggccccctttccctgcccgctggggagcggcgtctcagtgaaatcggctttctcctcagactctgtccctggtaaggagtgacaaggaagctcacagctgggcgagtgcattttgaatagttttttgtaagtagtgcttttcctccttcctgacaaatcgagcgctttggcctcttctgtgcagcatccacccctgcggatccctctggggaggacaggaaggggactcccggagacctctgcagccgtggtggtcagaggctgctcacctgagcacaaagacagctctgcacattcaccgcagctgccagccaggggtctgggtgggcaccaccctgacccacagcgtcaccccactccctctgtcttatgactcccctccccaaccccctcatctaaagacaccttcctttccactggctgtcaagcccacagggcaccagtgccacccagggcccggcacaaaggggcgcctagtaaaccttaaccaacttggttttttgcttcacccagcaattaaaagtcccaagctgaggtagtttcagtccatcacagttcatcttctaacccaagagtcagagatggggctggtcatgttcctttggtttgaataactcccttgacgaaaacagactcctctagtacttggagatcttggacgtacacctaatcccatggggcctcggcttccttaactgcaagtgagaagaggaggtctacccaggagcctcgggtctgatcaagggagaggccaggcgcagctcactgcggcggctccctaagaaggtgaagcaacatgggaacacatcctaagacaggtcctttctccacgccatttgatgctgtatctcctgggagcacaggcatcaatggtccaagccgcataataagtctggaagagcaaaagggagttactaggatatggggtgggctgctcccagaatctgctcagctttctgcccccaccaacaccctccaaccaggccttgccttctgagagcccccgtggccaagcccaggtcacagatcttcccccgaccatgctgggaatccagaaacagggaccccatttgtcttcccatatctggtggaggtgagggggctcctcaaaagggaactgagaggctgctcttagggagggcaaaggttcgggggcagccagtgtctcccatcagtgccttttttaataaaagctctttcatctatagtttggccaccatacagtggcctcaaagcaaccatggcctacttaaaaaccaaaccaaaaataaagagtttagttgaggagaaatgagcctttagaaaactgtttttcaagggttggctgacttgggtgatgcatttcaaaaagatgtttggtgatgcgatggaatagaagcactttagtcttcaacgtgccattgtcaagttcctgccttggctggtgaaggcaacccactgctcccccagccagtgctcgggggctggtgtccacatcccttggtagaggacgcgctgccgtgacctggacaacctccccgttcctgcatcccagcaacctgctagagcagggccagcccttccactcacctgtgtgtccctcaaaccctgcccattccgtaaattatgttcctgcgtaaatcatgtgacctggccaatgagtgggcgtgcaacccctgattctagcacattaggtcaaggataccaaggaccaaaaagtctagctttcacactgccatgtgcccaagcatggtggctcgtgcctgtaatcccagcactttgggagaccaaggtggaaggattgcttgaagccaggagttccagaccagcctgggcaacaaagtgagaccccagctctaccaaaaaaaggagttttttaattagctgagcatggtagcacatgcctatagtc

SEQ ID NO: 568 - protein, 557 aa, Homo sapiens [sequence omitted]

SEQ ID NO: 569 - DNA, 1674 bp, Homo sapiens
  source 1..1674: mol_type = genomic DNA
atgccacctcctcgcctcctcttcttcctcctcttcctcacccccatggaagtcaggcccgaggaacctctagtggtgaaggtggaaggtgagggagataacgctgtgctgcagtgcctcaaggggacctcagatggccccactcagcagctgacctggtctcgggagtccccgcttaaacccttcttaaaactcagcctggggctgccaggcctgggaatccacatgaggcccctggcatcctggcttttcatcttcaacgtctctcaacagatggggggcttctacctgtgccagccggggcccccctctgagaaggcctggcagcctggctggacagtcaatgtggagggcagcggggagctgttccggtggaatgtttcggacctaggtggcctgggctgtggcctgaagaacaggtcctcagagggccccagctccccttccgggaagctcatgagccccaagctgtatgtgtgggccaaagaccgccctgagatctgggagggagagcctccgtgtgtcccaccgagggacagcctgaaccagagcctcagccaggacctcaccatggcccctggctccacactctggctgtcctgtggggtaccccctgactctgtgtccaggggccccctctcctggacccatgtgcaccccaaggggcctaagtcattgctgagcctagagctgaaggacgatcgcccggccagagatatgtgggtaatggagacgggtctgttgttgccccgggccacagctcaagacgctggaaagtattattgtcaccgtggcaacctgaccatgtcattccacctggagatcactgctcggccagtactatggcactggctgctgaggactggtggctggaaggtctcagctgtgactttggcttatctgatcttctgcctgtgttcccttgtgggcattcttcatcttcaaagagccctggtcctgaggaggaaaagaaagcgaatgactgaccccaccaggagattcttcaaagtgacgcctcccccaggaagcgggccccagaaccagtacgggaacgtgctgtctctccccacacccacctcaggcctcggacgcgcccagcgttgggccgcaggcctggggggcactgccccgtcttatggaaacccgagcagcgacgtccaggcggatggagccttggggtcccggagcccgccgggagtgggcccagaagaagaggaaggggagggctatgaggaacctgacagtgaggaggactccgagttctatgagaacgactccaaccttgggcaggaccagctctcccaggatggcagcggctacgagaaccctgaggatgagcccctgggtcctgaggatgaagactccttctccaacgctgagtcttatgagaacgaggatgaagagctgacccagccggtcgccaggacaatggacttcctgagccctcatgggtcagcctgggaccccagccgggaagcaacctccctggggtcccagtcctatgaggatatgagaggaatcctgtatgcagccccccagctccgctccattcggggccagcctggacccaatcatgaggaagatgcagactcttatgagaacatggataatcccgatgggccagacccagcctggggaggagggggccgcatgggcacctggagcaccaggtga

SEQ ID NO: 570 - DNA, 8578 bp, Homo sapiens
  source 1..8578: mol_type = genomic DNA
ggcttatgatgtgctggacactgggctaatagtgctgaacatattgtcatttttaatcttcacaaacaatatttgtataggactgttttcttttcttttttttttttgaaacagagtctcactctggtgcccaggctggagtgcagtggtgtgatctcggctcactgcaacctccgcctcctggtttccagtgattctcctgcctcagcctcctaagtagctgggattacaggtgtgcgccaccatgcccggctaatttttttttttttttttgagaaggagtctatgtgcccagcattgttctagagcacttgcaattagtggtgaacaacacggtctctactccaaggggctcacattcttgtgcagaaaacagaaatgaacaaataaacacacaagatcatttcccgtggtagtgagagctgggatgaaaataaaacagcgtggcagggaggaggcaagtgttgtgagtctggagggttcctggagaatggggcctgaggcgtgaccaccgccttcctctctggggggactgcctgccgcccccgcagacacccatggttgagtgccctccaggcccctgcctgccccagcatcccctgcgcgaagctgggtgccccggagagtctgaccaccatgccacctcctcgcctcctcttcttcctcctcttcctcacccccatggaagtcaggcccgaggaacctctagtggtgaaggtggaaggtatgtccaaagggcagaaagggaagggattgaggctggaaacttgagttgtggctgggtgtccttggctgagtaacttaccctctctgagcctccattttcttatttgtaaaattcaggaaagggttggaaggactctgccggctcctccactcccagcttttggagtcctctgctctataacctggtgtgaggagtcggggggcttggaggtcccccccacccatgcccacacctctctccctctctctccacagagggagataacgctgtgctgcagtgcctcaaggggacctcagatggccccactcagcagctgacctggtctcgggagtccccgcttaaacccttcttaaaactcagcctggggctgccaggcctgggaatccacatgaggcccctggccatctggcttttcatcttcaacgtctctcaacagatggggggcttctacctgtgccagccggggcccccctctgagaaggcctggcagcctggctggacagtcaatgtggagggcagcggtgagggccgggctggggcaggggcaggaggagagaagggaggccaccatggacagaagaggtccgcggccacaatggagctggagagaggggctggagggattgagggcgaaactcggagctaggtgggcagactcctggggcttcgtggcttcagtatgagctgcttcctgtccctctacctctcactgtcttctctctctctgcgggtctttgtctctatttatctctgtctttgagtctctatctctctccctctcctgggtgtctctgcatttggttctgggtctcttcccaggggagctgttccggtggaatgtttcggacctaggtggcctgggctgtggcctgaagaacaggtcctcagagggccccagctccccttccgggaagctcatgagccccaagctgtatgtgtgggccaaagaccgccctgagatctgggagggagagcctccgtgtctcccaccgagggacagcctgaaccagagcctcagccagggtatggtgatgactggggagatgccgggaagcgggggtccagagacagaggggaggggaaactgaagaggtgaaaccctgaggatcaggctttccttgtcttatctctccctgtcccagacctcaccatggcccctggctccacactctggctgtcctgtggggtaccccctgactctgtgtccaggggccccctctcctggacccatgtgcaccccaaggggcctaagtcattgctgagcctagagctgaaggacgatcgcccggccagagatatgtgggtaatggagacgggtctgttgttgccccgggccacagctcaagacgctggaaagtattattgtcaccgtggcaacctgaccatgtcattccacctggagatcactgctcggccaggtagagtttctctcaactgggaggcatctgtgtgggggtactgggaagaagtggaagccagtcaatcttagattcccccaacccgagggctactcccagcctcaccccaaaccccaacttccacacagaacactgactccaagtctttcttttttttgacagagtctcgctctgttgcctaggctggagtgcagtggtgccatcttgtcttggctcactgcaacctccgcctcccaggttcaagtgattcccctgcctcagcctcctgagtagctgggattacaggtgcccaccaccacgcctggctaattttttttttttttttgagacggagtcttgcactgtcacccaggctggagtgcagtggcacgatctcagctcactgcaacctccaccttccaggttcaagtgattctcctgcctcagcctcccgagtagctgggattaaagcctggctaattttttttgtatttttagtagagatggggtttcattatgttggccaggctggtctcaaactcctgacctcgtgatccacccgcctcggcctcccaaagtgctgggattacagacatgagccacagggccgggccaagcctaattttgtatttttagtagagatggggtttctccctgttggaccaggctggtcttgaactcctgacttcaggtgatctgcctgccttggcctcccaaagtactgggattacaggcataagccaccgcacctggcctagacttcaagtctttcttccctcgcttccaagacactacttttctgggtcttcacctaccattgcttgcgcctgcccaccagcttgggtggagtcttccttcctccccaactcctcactcttggagccctgggccctcttcttatccctgtctgcacactttcctatttgaacttgactctcaatggcttcttgggtcaccatgccttggtgactctattccaggctccatactcagccatctcctgtgccatttgatatcccatggacacctcaggctcaacagatacaaaatcaaactcaatgtcttccccaagtatagtcttcttggtggcccagtgtaagcagagggcaccaccacctgctccctcgcccaggctaagaacctgggcatccttctttttcctcaccccgtccaacaaactggtcacagtgttctgccaattctctctccatgcaatcctatcatgctatcctaactgcaattcacaaacccaaccccaactttcactccaaacttgatccaagcaatgtgctggatcccaactgtaaccttgcaaactcaactctgcccttcactttgaccgtgactatccttaattgcagcaggaaactgatcattatgctcccctcaatccacacattgcctctgagtacagccatggtttgtccacgatttgctcaaagacactgccccatgtcctgtgccagggtctgtgacaatccctgacctcctgggacatggctccttagagagaggagagcctttctcacagcttgggactttgagtctgtgtctttttttttttcttgagacggagttttgctgtggttgcccaggctggagtgcagtgatctcggctcactgaaacctccgcctcccgggttcaaacgattctcctgcctcagcctcccaagtagctgggattacaggcacccaccaccatgcccagctaatttttttgtatttttagtagagatggggtttcaccatgttggccaggctggtctcgaactcctgacctcaggtgatccacccgcctttgcctcccaaagtgctgggattacaggcgtcaaccaccgcgcccggccgagtctgtgtcttgcctctgtgcctcagacttgcggttccttgagatctcaggattgggacgtaagatgccagcctggggtcctcgtctcatagccccttccccctagtactatggcactggctgctgaggactggtggctggaaggtctcagctgtgactttggcttatctgatcttctgcctgtgttcccttgtgggcattcttcatcttcaaagaggtgagtcatgtccccagtgggtctgtccaaaccctactccatcttccccaggataagccggctctggccagtctgacaaccatctttctttcctcccatccctcccttcaagaccccagaatcctgttctccccagtcttcctctagcctccctcaaacttcccaagcctcttgcaattttttttttttttttgagacagggtctcattctgtcaccccagctggagtgcagtggcacaatctgagctcactgtaacctctgcctcccaggcttaagtgattcttgtgcttcagcctcccgagtacctgggactacaagtgtatgccaccacacccggccaattttttatatttttagtagagacgaggtttcaccatgttggccagactggtctcgaactcttgacctcaaatgatccgcccacctcggcctcccaaagtgctgggattacaggcacgagccaccgcgcccgtccgcctcgcaatttgaactcctgtctcctttgttgaaccaagtgacctccccagcacctggccccacaaatcctcaccctgccaagcagcccctcctctgatcacgccctttaactcccaccagccctggtcctgaggaggaaaagaaagcgaatgactgaccccaccaggaggtaatgcaaccagtgcaccccgcggtaacaccctccaccttcactttatgccttgcacttactgtttcctctgcccaggggttctttgctccgtctctactgtttcaaatactgcccaacctcaaagcccagctccaaagctacctcctctgtgaagaactccttggaaatgatcatctcagactcctctattggctgtcccagcacaagtgatcacgtttaacttctgaaggcctggacagaatcttgagtgggtccgccattccattccaagtcggccctcaccgtgcacttcctcttctcccgccagattcttcaaagtgacgcctcccccaggaagcgggccccagaaccagtacgggaacgtgctgtctctccccacacccacctcaggcctcggtaagaggcaccgcccctccagcctatagctccgccccagatccggggctccacccccactctcctcatccctccaatccgctgtgcgccaagccttctggagctcggaactccgcccccggggcggggagtcccgcccagctatgagccccgcctctagaaccagaccccgcctccagggctcagagccacgcccccaggacccagagcctgaagtcgtaatcaagagcagaacttcgccccagaactgaaggcctcggccctagatttagattccgccccagggttcaaggccgggttcctagacccagagtccattcgcagagcccaaaacatcctcttcccgtgccccgccgcgcggacccttagccttgaccgcccccatctcttctgaccccgtcttacaatgcccctctcaccaggacgcgcccagcgttgggccgcaggcctggggggcactgccccgtcttatggaaacccgagcagcgacgtccaggcggatggagccttggggtcccggagcccgccgggagtgggtgaatgactgggagagggaagggtcgttccccacatggagggggttggagcggtctgtggcccgaatagtggactgggccctggaggagagggggcatgactcggttccccatccccatccccaaacccccaggcccagaagaagaggaaggggagggctatgaggaacctgacagtgaggaggactccgagttctatgagaacgactccaaccttgggcaggaccagctctcccagggtaaggctgccctcccccgtggccccccacctctgcggtggcctgtggactcccatggacacccctccttctccaccagatggcagcggctacgagaaccctgaggatgagcccctgggtcctgaggatgaagactccttctccaacggtaacttggggcctttgtgggacctcagagacttaggtgtaattgcagcgctgtgacactcctagaaggggtccctggagttctctctcttctgccacagctgagtcttatgagaacgaggatgaagagctgacccagccggtcgccaggacaatgggtgtgtgtgaggatggcaacagtccaggggggaggcggaggacacctggaggccaggaggaatagtaacctccctcttccctttccagacttcctgagccctcatgggtcagcctgggaccccagccgggaagcaacctccctgggtgagagatgctttcaatcagactgccttgcccagcttgggtgacctggcctcagctctgacaccagatccaactttgacctgaccctgaccccaaacccgaacccaatcctgtgactcctctcacctcaacactgagccccatcccccatcctgagccccatcccccatcctgacccccaatatttaccccctccctaactgtgaatatcaacaccgatcccaatgcagtatcagcctggacttgatctccacctcacctcagccccagtgcagacctcaacttggaccccagcttactctgcagcttcttcatgactctgactccgactccctccagtttcttctttttctttttcttttttttgagacggagtctccctctgttgcccaggctggagtgcagttgccacctctgcctcctaggttcaagcgattctcatgcctcagcctcctgagtagctgggattatagacgtttgccaccacacctggctaatttttgtattttcagtagagacagggtttcgccatgttggccagactggtctccaactcctggcctctagtgatctgcccgccttggcttcccaaagtgctgggattacaggcatgagccaccacgcccagcccagttctgttcttgaccccttccttagccataatctaacccatatctaaccctgaccctacagctaactggggccccaaactcaatgctaaccaaatcaccccttcccagcacagcatgggtaatgctcctcaccttcctctgcccctcagtcttcctccttaccgtaggctgtacttcccatgccctagcctccaattctccatcccccgcccaagcagggtcccagtcctatgaggatatgagaggaatcctgtatgcagccccccagctccgctccattcggggccagcctggacccaatcatgaggaaggtgggtgcttctgccgctgtcccctgctgtcccctgggctgactttgccttccagcctacttccagtgccacccatgttctcctcctccctggtcctatccagatgcagactcttatgagaacatggataatcccgatgggccagacccagcctggggaggagggggccgcatgggcacctggagcaccaggtgatcctcaggtggccaggtgagctgggactgcccctagggaaagcggggagggagggagataggcacggatggcagtggctgctggctttcagggagggagagggaacagggttcctagggcctggtgggcagggggaggactgctggacccctccccatcaccgtttcttctgcatagcctggatctcctcaagtccccaagattcacacctgactctgaaatctgaagacctcgagcagatgatgccaacctctggagcaatgttgcttaggatgtgtgcatgtgtgtaagtgtgtgtgtgtgtgtgtgtgtgtatacatgccagtgacacttccagtcccctttgtattccttaaataaactcaatgagctcttccaatcctatgaagtagtgccattgtgtgggaaggaagggaaggaaaggaaaggaaggaaagggaagggaaggaaaggaagggaaggaaaggcgtcttgaatcccatggaagagggagggctgccttctgcatacaaagggccttttcccggtgcggtggcccacacttgtaatctcagcactttaggaggccaagcaggtggatcatttgaggtcaggagttcgagaccagcctggtcaacctggtgaaaccccgtctctactaaaaatacaaaaattagctgggtgtggtggcgagcctgtagtcccagctacttgggaggctgaggttggagaatcacttgaacctgggaggcagaggttgcagtgagtggagatggtgccattacacttcagcctgggcgacagagcgagacttcgtctcaacaaaaaataaaaataaaaataaaacaaagggcctttccccttccatggcctagccttcacctactgccctcttttgcccgctgcccacagatccgtcacgatcagccccctcccaccatccagctacccaattatcattaattcagcagttacatgctgggtgcccagtggagaaaca

SEQ ID NO: 571 - protein, 169 aa, Homo sapiens
MAAESLPFSFGTLSSWELEAWYEDLQEVLSSDENGGTYVSPPGNEEEESKIFTTLDPASLAWLTEEEPEPAEVTSTSQSPHSPDSSQSSLAQEEEEEDQGRTRKRKQSGHSPARAGKQRMKEKEQENERKVAQLAEENERLKQEIERLTREVEATRRALIDRMVNLHQA

SEQ ID NO: 572 - DNA, 510 bp, Homo sapiens
  source 1..510: mol_type = genomic DNA
atggcagctgagtcattgcctttctcctttgggacactgtccagctgggagctggaagcctggtatgaggacctgcaagaggtcctgtcttcagatgaaaatgggggtacctatgtttcacctcctggaaatgaagaggaagaatcaaaaatcttcaccactcttgaccctgcttctctggcttggctgactgaggaggagccagaaccagcagaggtcacaagcacctcccagagccctcactctccagattccagtcagagctccctggctcaggaggaagaggaggaagaccaagggagaaccaggaaacggaaacagagtggtcattccccagcccgggctggaaagcagcgcatgaaggagaaagaacaggagaatgaaaggaaagtggcacagctagctgaagagaatgaacggctcaagcaggaaatcgagcgcctgaccagggaagtagaggcgactcgccgagctctgattgaccgaatggtgaatctgcaccaagcatga

SEQ ID NO: 573 - DNA, 6350 bp, Homo sapiens
  source 1..6350: mol_type = genomic DNA
tgtcacaacacgacctcagcctgtcaagtcacatgacctctgcctgtcactgacaacctggtctgtctttaggccaggggagaccatctggtccaccctccacactacccccattttcagagaggaaatggaggtgtggagcagcggagcagcctaaccaaagacctgtcattgccacaccactccagtcacaaccggccttgtgacagtttctacttaaactctggctgcccccatgagggtatgacaggatatgtaacaggccaccacatggcctctgttttcaaggcacaagaaaaatactttgcattctgggtggtgcgttttacttttggtcaagttgcctccaagttcatggttctcattttaccttcacaacttttatctttaatttacaaacaaggacggtaagatcccttggcaagtgatggggagttgagtctaaaatcgcggctccggtctccccagtccagggcagtcctgcgctgaagtgcactcacacgtcccgggatgagactccgctgtaaatctcgacccgaacacctaggaggcaggcctgtgccgcgctcctcacacagggagtcacaggacttgctgtctggtacagcaagagagggtcttggagaaagccataggagtaccgtgggggaaaataggtggccaaacagaatcgggtccactgggcaaaatacatgacttctggcaggctgagggcttaccaactacaaggtaaaagtcaagggcgctgttctgagagaagcggaaaatgactaccaagggattccagtacctcggccccttttgggagatttacggggctagaacaggagaccacccccgtttttttgtttgtttgttttgttttttgtttttggtgaaacgtagtctcgctctgtcacccaggctggagtgcagtggcgcgatctcggtcactgcaacatccgcctccagggttcaagcgattcttctgcctctgcctccagagtagctgggattacaggcgcgcatcaccacacccggctaatttttgtatttttagtagagacggggtttcaccatgttggtcaggctgatctcgaactcctgacctcaagtgatccgctctcctcagcctcccaaagtgctgggattacaggcgtaagccactgagcccggccaggagacctctttaagaagactcgagatgtcgacaatcccagtggatggataccaactttaaaaagaaaagttcaaaaggcctatgtgcccattagctgggaggggccaagaaatatgggagtcccttatagtgggggtaaaacggcgggtaaagctaggtgggcggaacagcagcttctgggggagacaagcggcaaagaggctcacgaccgactaggggcgaccaaggctgatagccgttggggccgttgggcgccgggagctggcgccccgccctctctcctctcccccaccctccgcacctcccaccaccctcggtgtcccctgcgcgtgcgcgtgcagacaccggttgccaaacattgcatcatccccgcccccctttcctcccctccccccccgctacactcccctccgcgcgcgcgcatgactcacccacctcctccgtgaagcctcgtgacccaaagccacttccgggtccgacactacgtcgaccccctagcgagagggagcgacgggggcggtgccgcggggctcctgagtggcggatgcgagggacggggcggggccaatgccggcgtgccactttctgattggtaggttttggggtcccgcccctgagaggagggcaaggccatggtaaaagattacagccaggcgctcccgaggtcagagacttaagtctaaggcactgagcgtatcatgttaaagatgagcgggtggcagcgacagagccaaaatcagagctggaacctgaggagagaggcgagtactgattcccatctaccttttaccctcccgtctcctcaaagttggggcgtccgctctttaggatcggcctcactcctccacagtgaagttagggaccgtccgagagaggaatggggagagtcccttattctggggtggtgcttacaaacccctattgcttcggacgacggcgtctctccacccctgcccggagccggaacacgggccctgctctgtgctgctgggcaaagggacctcggttgcccttgggaaattcattctttcccgtagccaacttcaggcctcatcgttaggcctgtccgcggggaggcaggtcagcaggacacacccccgctctaagactgggtgaccatcgctcaggccgtttccgccgcttcgccaccagcgggccttctccctaccccacccccaattctgtctcagtctcagtgcctctggtgtcagcatggccaccttggtagctggggctactggaccctgcagcggataggggaaccttgaggagacacaagcctttgggaggggtgccgatggacagggagtggtgtgttttccttttgccgtagaggtctctgggcctcctgcacaagagagcagcctggatctcttaagtgtaggaggccatttggggtctccccagggtattgtccttccctcgggattagtccctgcctctttaacccggtcctgtctcccagctaatctctgtgtaaccattgcatcaggccagccccgtttggctctgcagccttctgacctgaggctctactgctgatgaaagccaagtcccacacactggaaggcaagggagggttccccagggaggacagccctgcagagaaatacttcgggcaatattgcatctctagcccctagggatcagcagctgccactctgcttctgccccttccctataagagagactggggggagtttatccattcattcttaacaaatacttaatgaggacctactgtgtgccacacagtttggggctcagggtacatccttgagcaagaggaaaaaatcatctcagtgggaggcctacagtaaacaaaatataagtgccacggagaaagctaaagcagagaaaggaatggagaatgttcaggatggaggtcagagtgttacatcaggtggtcaggaattaccttaggtaattcctccactcaaaacccttcagtgacttccatgacatgaaataggaagtcattggagggtttgagcagaggaatgacctgttttaaaaggctcactcaggctgctgtatggtgaatagagttgcggaggggtggcaagagaagaaatgggaagaccttctgcagtcagaaagtttctgcagtaatttagagatggtagtgaattgatctagattggaaacaatggaattagaagtgtttagattcttctaagcaaaggttttaaaaactcatttttaaagaatgagttaagggccgggcatggtggctcacacctgtaatcccagcactttgggagaccagaggtgggtggatcacctgaggtcaggagttcaagaccagcctggccaacatggtgaaatcccatctttactaaaaatacaaaaattagccgggcatggcagtgcatgcctgtaatcccagctactccggaggctgaagcaggagaatcgcttgaacccagcaggcggaggttgcagtgagccgattgcgccactgccttccagcctgggcaaaaagagtgagacccgtctcagaaaaaaaggaatgagttaaaatttgctagtactttggattgcagggtgtgagagaagaggaatgaaggatgataccaaggtttttagcttaagcaactagagttgtcatctgagatggggatgaccttggaaggggaaaatcagcaagagtttgcctttgcacatagtcttaggtgcctattagacattgaaaaagaaatggcaagtaggcagtagacagcagagtctgaagttctggaagaggtccagactggaaatgtacatttggaggatgtcagccctgtgggaatggagttaggaaaatgctatgatttgttcccttccctgtagtttagtttttaccctggcagatttgaggcctgctttggatttagagaaagctgagttggccaggactttactattatgtaaccaggactacaaatgtcagcaactaaaaataaagaaagtcaggccctcttctgcccttcgaaatggctacagggaccaagtatgcataccccacaagaccagaagtaaggaaggaccagtaggaggctggaggtaaaagaaaaataagggcccagcacggtagctcatgcctataatcccagcactttgggaagcgatggatcacaaggttaagagatggagaccatcctggccaacatagtgaaaccctatctctgctaaaaacacaaaaattagctgggcgtggtggcacgcgcctgtagtcccagctactcgggaggccgaggcagaagaatcacttgaaccgaggaggcagaggttgcagtgagccgagatcgcaccactgcacttcagcctggcaacagagcaagacttggtctcaaaaaaaaaaaaagaaagaaaaaaagaaaaagaaaagtaagttgcctctcccccttccaaaaatggctgacatttctctttgttgcccacagtgttcaagaaggaagtgtatcttcatacatcaccacacctgaaagcaggtaaacttaacctacccttttccaaaaattttaaacggcaggacagtaaatattttagatgttaaaagtcctatagtctctagcgtgactcttcatctctgccactgtagcaccaaagcagccataaacaatatgtaaataaacagatgtggctgtattccagtacaactttacctacaaaaacaggcatcagaccagcttgccaacttgtggcatagactgtttgctacatggagcttgttccagccactccccattatcctgcagatgtgcttttccagactgatccaactgcagagatggcagctgagtcattgcctttctccttcgggacactgtccagctgggagctggaagcctggtatgaggacctgcaagaggtcctgtcttcagatgaaaatgggggtacctatgtttcacctcctggaaatgaagaggtaagaatgttagccctaaagctaaagggggatgttacctttcccttctcaactaatatctatgttccctttcctcatttccttgaaggaagaatcaaaaatcttcaccactcttgaccctgcttctctggcttggctgactgaggaggagccagaaccagcagaggtcacaagcacctcccagagccctcactctccagattccagtcagagctccctggctcaggaggaagaggaggaagaccaagggagaaccaggaaacggaaacagagtggtcattccccagcccgggctggaaagcagcgcatgaaggagaaagaacaggagaatgaaaggaaagtggcacagctagctgaagagaatgaacggctcaagcaggaaatcgagcgcctgaccagggaagtagaggcgactcgccgagctctgattgaccgaatggtgaatctgcaccaagcatgaacaattgggagcatcagtcccccacttgggccacactacccacctttcccagaagtggctactgactaccctctcactagtgccaatgatgtgaccctcaatcccacatacgcagggggaaggcttggagtagacaaaaggaaaggtctcagcttgtatatagagattgtacatttatttattactgtccctatctattaaagtgactttctatgagccaaggtcttttactttttcttcttgcctttaggggcttcagggggtttcccctcagctacagccaactgtttctttagatccaagagtttcgccacctccgcagcaacctcgttcttgtctgccttttgtgctttcagttctcggacaatgtttccctaagataaaggggggtggggaggtaacagtgaggcaagaaaaagatctatttaggattcagcttgtccagtctcccacagggcttaagcttcatacttgttttgtcacttcatccatcagcgcttgtatctgctgtggcttggctgttgtaacagtctctacaactgctggcttcggggacgtttttgcctggagaacaacaaagttatcaccagcaaccataaatatcccctaacctccagttttatacagcatctcagagggaaagtggttacctttaagtcgaaggtctcttctagttaagacaggaaagaaaaactgtaagtgaggaagcggcagggccaaaagatggaaagagtgatgggtgaggactacttagggaaattagggaagtgatgctgtggctgttgtggagcgagggcacagcctttagctttctcacctgg

SEQ ID NO: 574 - protein, 1131 aa, Homo sapiens
MRCLAPRPAGSYLSEPQGSSQCATMELGPLEGGYLELLNSDADPLCLYHFYDQMDLAGEEEIELYSEPDTDTINCDQFSRLLCDMEGDEETREAYANIAELDQYVFQDSQLEGLSKDIFIEHIGPDEVIGESMEMPAEVGQKSQKRPFPEELPADLKHWKPAEPPTVVTGSLLVGPVSDCSTLPCLPLPALFNQEPASGQMRLEKTDQIPMPFSSSSLSCLNLPEGPIQFVPTISTLPHGLWQISEAGTGVSSIFIYHGEVPQASQVPPPSGFTVHGLPTSPDRPGSTSPFAPSATDLPSMPEPALTSRANMTEHKTSPTQCPAAGEVSNKLPKWPEPVEQFYRSLQDTYGAEPAGPDGILVEVDLVQARLERSSSKSLERELATPDWAERQLAQGGLAEVLLAAKEHRRPRETRVIAVLGKAGQGKSYWAGAVSRAWACGRLPQYDFVFSVPCHCLNRPGDAYGLQDLLFSLGPQPLVAADEVFSHILKRPDRVLLILDGFEELEAQDGFLHSTCGPAPAEPCSLRGLLAGLFQKKLLRGCTLLLTARPRGRLVQSLSKADALFELSGFSMEQAQAYVMRYFESSGMTEHQDRALTLLRDRPLLLSHSHSPTLCRAVCQLSEALLELGEDAKLPSTLTGLYVGLLGRAALDSPPGALAELAKLAWELGRRHQSTLQEDQFPSADVRTWAMAKGLVQHPPRAAESELAFPSFLLQCFLGALWLALSGEIKDKELPQYLALTPRKKRPYDNWLEGVPRFLAGLIFQPPARCLGALLGPSAAASVDRKQKVLARYLKRLQPGTLRARQLLELLHCAHEAEEAGIWQHVVQELPGRLSFLGTRLTPPDAHVLGKALEAAGQDFSLDLRSTGICPSGLGSLVGLSCVTRFRAALSDTVALWESLQQHGETKLLQAAEEKFTIEPFKAKSLKDVEDLGKLVQTQRTRSSSEDTAGELPAVRDLKKLEFALGPVSGPQAFPKLVRILTAFSSLQHLDLDALSENKIGDEGVSQLSATFPQLKSLETLNLSQNNITDLGAYKLAEALPSLAASLLRLSLYNNCICDVGAESLARVLPDMVSLRVMDVQYNKFTAAGAQQLAASLRRCPHVETLAMWTPTIPFSVQEHLQQQDSRISLR

SEQ ID NO: 575 - DNA, 4657 bp, Homo sapiens
  source 1..4657: mol_type = genomic DNA
ggttagtgatgaggctagtgatgaggctgtgtgcttctgagctgggcatccgaaggcatccttggggaagctgagggcacgaggaggggctgccagactccgggagctgctgcctggctgggattcctacacaatgcgttgcctggctccacgccctgctgggtcctacctgtcagagccccaaggcagctcacagtgtgccaccatggagttggggcccctagaaggtggctacctggagcttcttaacagcgatgctgaccccctgtgcctctaccacttctatgaccagatggacctggctggagaagaagagattgagctctactcagaacccgacacagacaccatcaactgcgaccagttcagcaggctgttgtgtgacatggaaggtgatgaagagaccagggaggcttatgccaatatcgcggaactggaccagtatgtcttccaggactcccagctggagggcctgagcaaggacattttcatagagcacataggaccagatgaagtgatcggtgagagtatggagatgccagcagaagttgggcagaaaagtcagaaaagacccttcccagaggagcttccggcagacctgaagcactggaagccagctgagccccccactgtggtgactggcagtctcctagtgggaccagtgagcgactgctccaccctgccctgcctgccactgcctgcgctgttcaaccaggagccagcctccggccagatgcgcctggagaaaaccgaccagattcccatgcctttctccagttcctcgttgagctgcctgaatctccctgagggacccatccagtttgtccccaccatctccactctgccccatgggctctggcaaatctctgaggctggaacaggggtctccagtatattcatctaccatggtgaggtgccccaggccagccaagtaccccctcccagtggattcactgtccacggcctcccaacatctccagaccggccaggctccaccagccccttcgctccatcagccactgacctgcccagcatgcctgaacctgccctgacctcccgagcaaacatgacagagcacaagacgtcccccacccaatgcccggcagctggagaggtctccaacaagcttccaaaatggcctgagccggtggagcagttctaccgctcactgcaggacacgtatggtgccgagcccgcaggcccggatggcatcctagtggaggtggatctggtgcaggccaggctggagaggagcagcagcaagagcctggagcgggaactggccaccccggactgggcagaacggcagctggcccaaggaggcctggctgaggtgctgttggctgccaaggagcaccggcggccgcgtgagacacgagtgattgctgtgctgggcaaagctggtcagggcaagagctattgggctggggcagtgagccgggcctgggcttgtggccggcttccccagtacgactttgtcttctctgtcccctgccattgcttgaaccgtccgggggatgcctatggcctgcaggatctgctcttctccctgggcccacagccactcgtggcggccgatgaggttttcagccacatcttgaagagacctgaccgcgttctgctcatcctagacggcttcgaggagctggaagcgcaagatggcttcctgcacagcacgtgcggaccggcaccggcggagccctgctccctccgggggctgctggccggccttttccagaagaagctgctccgaggttgcaccctcctcctcacagcccggccccggggccgcctggtccagagcctgagcaaggccgacgccctatttgagctgtccggcttctccatggagcaggcccaggcatacgtgatgcgctactttgagagctcagggatgacagagcaccaagacagagccctgacgctcctccgggaccggccacttcttctcagtcacagccacagccctactttgtgccgggcagtgtgccagctctcagaggccctgctggagcttggggaggacgccaagctgccctccacgctcacgggactctatgtcggcctgctgggccgtgcagccctcgacagcccccccggggccctggcagagctggccaagctggcctgggagctgggccgcagacatcaaagtaccctacaggaggaccagttcccatccgcagacgtgaggacctgggcgatggccaaaggcttagtccaacacccaccgcgggccgcagagtccgagctggccttccccagcttcctcctgcaatgcttcctgggggccctgtggctggctctgagtggcgaaatcaaggacaaggagctcccgcagtacctagcattgaccccaaggaagaagaggccctatgacaactggctggagggcgtgccacgctttctggctgggctgatcttccagcctcccgcccgctgcctgggagccctactcgggccatcggcggctgcctcggtggacaggaagcagaaggtgcttgcgaggtacctgaagcggctgcagccggggacactgcgggcgcggcagctgctggagctgctgcactgcgcccacgaggccgaggaggctggaatttggcagcacgtggtacaggagctccccggccgcctctcttttctgggcacccgcctcacgcctcctgatgcacatgtactgggcaaggccttggaggcggcgggccaagacttctccctggacctccgcagcactggcatttgcccctctggattggggagcctcgtgggactcagctgtgtcacccgtttcagggctgccttgagcgacacggtggcgctgtgggagtccctgcagcagcatggggagaccaagctacttcaggcagcagaggagaagttcaccatcgagcctttcaaagccaagtccctgaaggatgtggaagacctgggaaagcttgtgcagactcagaggacgagaagttcctcggaagacacagctggggagctccctgctgttcgggacctaaagaaactggagtttgcgctgggccctgtctcaggcccccaggctttccccaaactggtgcggatcctcacggccttttcctccctgcagcatctggacctggatgcgctgagtgagaacaagatcggggacgagggtgtctcgcagctctcagccaccttcccccagctgaagtccttggaaaccctcaatctgtcccagaacaacatcactgacctgggtgcctacaaactcgccgaggccctgccttcgctcgctgcatccctgctcaggctaagcttgtacaataactgcatctgcgacgtgggagccgagagcttggctcgtgtgcttccggacatggtgtccctccgggtgatggacgtccagtacaacaagttcacggctgccggggcccagcagctcgctgccagccttcggaggtgtcctcatgtggagacgctggcgatgtggacgcccaccatcccattcagtgtccaggaacacctgcaacaacaggattcacggatcagcctgagatgatcccagctgtgctctggacaggcatgttctctgaggacactaaccacgctggaccttgaactgggtacttgtggacacagctcttctccaggctgtatcccatgagcctcagcatcctggcacccggcccctgctggttcagggttggcccctgcccggctgcggaatgaaccacatcttgctctgctgacagacacaggcccggctccaggctcctttagcgcccagttgggtggatgcctggtggcagctgcggtccacccaggagccccgaggccttctctgaaggacattgcggacagccacggccaggccagagggagtgacagaggcagccccattctgcctgcccaggcccctgccaccctggggagaaagtacttctttttttttatttttagacagagtctcactgttgcccaggctggcgtgcagtggtgcgatctgggttcactgcaacctccgcctcttgggttcaagcgattcttctgcttcagcctcccgagtagctgggactacaggcacccaccatcatgtctggctaatttttcatttttagtagagacagggttttgccatgttggccaggctggtctcaaactcttgacctcaggtgatccacccacctcagcctcccaaagtgctgggattacaagcgtgagccactgcaccgggccacagagaaagtacttctccaccctgctctccgaccagacaccttgacagggcacaccgggcactcagaagacactgatgggcaacccccagcctgctaattccccagattgcaacaggctgggcttcagtggcagctgcttttgtctatgggactcaatgcactgacattgttggccaaagccaaagctaggcctggccagatgcaccagcccttagcagggaaacagctaatgggacactaatggggcggtgagaggggaacagactggaagcacagcttcatttcctgtgtcttttttcactacattataaatgtctctttaatgtcacaggcaggtccagggtttgagttcataccctgttaccattttggggtacccactgctctggttatctaatatgtaacaagccaccccaaatcatagtggcttaaaacaacactcacattta

SEQ ID NO: 576 - DNA, 32171 bp, Homo sapiens
  source 1..32171: mol_type = genomic DNA
ctactaaaaataaaaaaataaaaaattagcggggcatgatggtgtgagtctgtagtcccagctactgggaaacagagatgggaggtttgtttgagcctgggaagttgaggctgcagtgagttatgatcacgccactgcacaccagcctgggcaacagagcaagaccctgtcaaaaaaaaaaaaaaggctatgtaacatgcccaaagtcacataattggcaaggagcagcagatctgggacttgaacataggcagattagctccaagcctatttgcttaacctctataccacaatgccttcttgctatggtaaaacatctgaaaagacctattaccctataggtcctctaaggaggcatgtcgccttcctcttagcaatactagattggctccaacagaaggctgtgggcttctctggcacatgcacctgggtaggacccagagaatatctgtggagtctgaatcaacccaaaagccaatatccatccgttcatcaggaaccccagcctacaacgcaaaagaggaaatcttcctaagtagaaataaactgtaataaattgcagaggttccctcgtcctggttttcacttcatgttttggatgctgcatgctgggtgagcggagattccaggcactggccagggcagctgccctgactccaagggctgccatgaacaacttccaggccatcctgactcaggtgagaatgctgctctccagccatcagcccagcctggtgcaggccctcttggacaacctgctgaaggaggacctcctctccagggaataccactgcactctgctccatgagcctgatagtgaggctctggccaggaagatctctttgaccctactagagaaaggagacctggatttggccctcctggggtgggcccggagtgggctgcagcccccagcagccgagaggggccccggccacagtgaccatggtggtaagttggcatcacttttaatcaaggagaaatgacagactgtagacagctcaaggattttccctcctctctgaaagggaagtcaatgggaaggcagactggtgagaaatccaagtgtctagtgagctggcaggagcagtgaaaacttggagcactgtctctgttgctgggtgtgctggagcgaacggcgtgcttcccactctgctggaaggaaccatcccaggggcacgcagccaaatgcctgcttgggttcactccctgagccctgacgatacaccaacattaacggggcatggatggacagatcagctcctgccttcaaaggggtctgctgtctagtggggaagatggatgcaggcacaatcagtgtgagtcaaaatgagagaaatggggccgggtgcactggctcacgcctgtaatcccagcattttgggaggccaaggcaggtggatcacctgagatcagttcgacaccagcctggccaacatggcaaaaccctgtctctactaaaaaatacaaaaaacagccagacatcctggtgggtgcctgtagtcccagctactcaggaggctgaggcaggagaattgcttgaactgggaaggcagaggttgcaatgagccgagatcacgctactgcactccagtctgggcaacagagcaagactccatctcaaaaaaaaaaatagagaaatggggtgcagagaaaggaggagccagagaaaaagctgaaagcagagcccactgtgtgtgttgggggggggcatgtgtgcgtttgcatgcatttgcttgtgtgtgcatgtgtgtgtctgtgtgacacacagagacagaaaccgaaagacagagggagagcgagaaaggaagggagagaaagacagacacagaaagagacagagagacaggcagagacagggagaaaagggagggagaggaaggaaggtggaggctgatggaggaagagaaaaagggagaaggtgggggaaagaaagagagagaaagagagaataagaactcgcttacgggagagagaatgaaggccttatttttaagagcgttggtggcacacaatcatctcaaaccagaaagacaagcctgcactgtcctctttccactcacatccttggctcctccaactttttacgtctcctacccacttacaaagaagtcctcccttcattgtaatgtcacaactttctttctttttttgagacggggtctgttctcttgcccaggctggagtgtagtcgcatgatcacagctcactacagcctccatttgcggtgcttaagtgatcctcccacctcagcctcccaactagctgggactacaggcatgcaccactatgcctggctaatttttttttaattattttttgtagagatgaggtctcactatgttgaccaggctgcttgcgaacccctgagctcaagcgatcctcccaccttggcctcccaaattgctgggcttacaggcatgagccaccacacccaacctggtcataactttctaaagacggtgtttgttccatctccttctgaaatgcaagtcttgagagaataacagtgattgacattgattatttagtgtgccagaaacagcctaagcgcaatctagaaccctcttacttctcccttgaccttgagccctttgatccccatccttatttaacacttaaagaagaaaacagactctgcccaggggtgacgcaacttgcccaggtcccccaggtgggaagcggtgaagactggatttgaagacagacaagctttgatcttcaacttagccttcagggcatcaaatgcattttggcggccttatcttgggcaccagggcagtgttgtttaccagctttcctgccaagacaacatttctacagggctggttcttcttgtggtcaaattctcacccaagtggtttccatcgtctattggactcctctttaattctcttcctcctaacagtcacctaggcaaaggggcatctttaccacccaaacattctcccttggcttctcaacaggggcgcagacagccagtgtggtcttgatggtggcacagatgccacctgggggagaagccagaaccttcctctctccctggctgcagcccctcctgccccagccacatgtgccttcactgccggacacttcagcccctcccaccccctctttccgagagtgctggttcctgttatttaactctgtttcctccctcgggaggtaatatatttatttctgatcccacgtgactccagaaagtggaactgcactcggggcccagtgtggtcttcggggagctgggaggggtgcagggcaagttgctcttttcctgctttctctttctgccctccagccagcttccctccagggctgccaggcttgacctgcgacagtgggcaggtgtgctgctgctgggcagctctcagaggggaagaaagaggacagggcaagagaattgcatggtttgtaaacaaagggcactgactttcattttgatgggggttcggaaaaggaaatcatccatgtggggtttttgtgaccctccctctcaaccactctataatgaccttggccctctgctgtgctaaacgctgcactggctcccacgttactcagagaaaaagctaaatctggacaatggcccacaaggcctttcctacctcatcagctccctgctctcatcccctactcctgtctgccttgttcatctactccagccatgttggcaccctcgctgttccttagacacgctcagcacactgtctgcctcagaacctttgcacatgccgttccctctgcctggagcactgttctctaagcattttcttggtcaacctcctaaattccttctattctttgcaccttatcaatgaagcctgccctgaccaagccatttagaattgcaactcctccctccacactctgagccccctccccagattgattttttccccactttttttttttttgatacagagtcttgctctatcgcccagcctggagtgcagtggtgagatctcagctcactgcaacttccatctcccaggttcatgcagttctcatgcctcagcctcccaaatagctgggattacaggtttgtgccactatgcctggctaatttttgtatttttagagacagggtttctccaagttggccaggctggtcttgaactcctgacatcaagtgatccgcccaccccacaaagtactgggataacaggcatgagccactgcgcctggctccccaccttctgtatatcttacttttgtattacgtgtgtgttgtttattgtttgaccctcccactggaaaataaactccacatggacatggatctatgttttgatcacaatatgtcccaaatacctagcacagggcctgagcacagggtaggtatgcaatatatatttgttgaatgttcagtggatggatgcgttgatgagtgggtagatggatgaatggatagttcatgtaatgccattattcctactttaccaatgagtaaactgaggcacagagaagttaatgatttgcctctggtcatgacctgaggagggagactatggggtctcatgagtcctggccaattgcagtacttcctgcaaaaaaaaaaaaaaaaaaaaaaaaaaaagtactgctttagcttcctcttctaaacaacccaaggggctaccgtaaatctaccccaaatagggtggcagtcttcaaactgaaaccagcctgatgattcagaagtccccttcagatattgcagtgccttaggtgcaattgtgcagaaagcccagttctggagatgggagcttaggggtttcgctctgtgctacactgagcaacctgtgtgcatccagccccaggaaagttccagtgagtcccaagagtcaaagtccttgccctggaggaactcaggtgcctcagtgggaagttaaagcaaacatttaggcagtccctggtcaacagtgggtcacaacatctgaacaacatctatcagaggccaaagaagggggagctaggatgggtgatgatggaaaaagaaccaggctggaggctggacagctggacagctctggatctgaagccatgttctgctccttacgtaccatgtgaccttggccacatgactagaccactcggaatctcagtttcttcatctctgaaatgggagcaatgatacgaatctcccagggctctagtgagggttaaatgagatggtaggtagaaaccttccaaggcagtgcttggcattaggtcgcactgtataaatatcagaccactctgagtctaacagcaaggagaatggaacaggaagaagataaaccaggggtttgaggcaccaagaaaaataattactgcagtctgggggccccagacaatatctagacacctaccccatgcaaaatgcagtgctgagtgcttgggtactgtgcatatttgagaaacaaatcaatgtggcccctgccctcgagttgaactggcacatgggccatgtcctcagacagcctgagtgcctgtcctgccttcccaattccaagaggtatgactttgagcacttcccgggcgccccgcctcagtttccccatctataaagtggagatgataatagcattcagagtcactgatctaagggctcagggacaccattcagtgtaagccccatacactccctgcaagaggaagctggttctgactcagccttgaggctggcgtctgaggcaaccacaagcccaacgtgcatggtggaaagatgactgtaagtgggggcaacctcagctggccttgggtttgaccatggaatgcgaggcacaaaggggcccattttgcatactttctcagaggctgtagggcacccctgccagggtcttacattttattgattcctctgactctactttgttggttgtttttgttgttctgatttcattgcgtgacatttttgcccatgaggtctcagttctaggaatgacagaacaaaggctccctctgggaagtcgcctgatttattggaaagggaggaacaccccacccttagggatcgctaagctcccttcctccagcttccttccccatctggcccttaggatgtgagaaaccagagctgtgacacaccagagaggagagaggctgtgccctctcaccttctgggcttcctttcctgagaaccagcccctgttctgattttgggagtctcctttgcctcagggagggggatgtgttggcgaggaagactcgtgcctttcatcttggactgcttctctggccctctaccccaggaaccacagaaggagacacacctgtacccggaagctggcatttccccatgggttttcccaggccagcctgttccaaacacagcttgcccccaagcctggcacttctccaaccagtcacggtttctgttctctgttgctatgaccttgagcagttcacctgcgttccttactgtctactttcccatccacctacctgcctgccctccaactttcctgatctgtgtacctaccttcctatatctacttctttttattattattatcattattctcaccctgtcttttttttaattttttttgggtgggggggacacagtcttgctttgtagcccaggctggaatgcagtggcgtgatctcagctcattataacctctgcctcccagattcaagcaattctcctgcctcagcctcccgagtagctaggattacaggcgcctgccaccatgccgagctaatttttatatttttagtagagacagggtttcatcatgttggccaggctggtctcaaactcctgacctcaagcaatccacccatctcagcttcccaaaatgctgggattataggcgtgagccactgtgcccagcctctcgccctgtcttatggtggtaatctacttctcaatttatctatttatatctactgtctacatacttatacacttatttactcatgtctacttatcagttaatccatttctctacctacctaatcacccatatatttcccatgtatttacatgtcaaagtatttccctgcattcctaccagctaagccccctttacaacaatccatcagcaggtccaggttctcatacaccctcccatgtccctccctaatttggatacatagcagttgtattctactcacctatctccctattcaccgatctctttctctccctttcttgcctcctttctttccttctcctgaatcatttatttagcacctgctagaaattatggtggactccccatccagtgctctttcaccaaaaagcatgagatgaagaaggacttttaacctagtaggggaggaatcttcatccatttggaactggaggctgccttgatcattcaaatctaaaactccattcattccttcaaatggtcttagaatagtgtatcttctattttattattttattttattttttgagacagggtcttgctctgtcgccaaggctggagcacagtggcgcaatcacagctcactacagcctcaatctcctgggctcaagacatcctcccatctcagcctcccaagtagctgggactacaggcatgcaccactatgcccggctaatttttttatttgtggtagagatgaggtctcgctatgtttcccacggctggtctcaaacttctgggctcaagcgacatacctgccttagcctcccaaagtgcagtgtgccactgcacctcgcctgataatgtgtctttcaaatgctcagtcttgtgtaggtattggggtaagtgcagaaaattaaagacctgatcctagacattaacagatgtatgatctaatcagaggtagcagagatgatgcttatgaacttgaaagttaaagttgtattgccaaataatgttgcagcaagttttgtaaaacacagcaaagcaagaaaattatagttagctggaagcgcgatgaaggtgggaactcgagctttgcaggatggctaaaatatagaccaaaagggagaaggcaggagagcagcaccgggagggagcaagctcccagcattcttccttggcttgcagggaaccaaggtgcaaaggtaggactgagcagaatctgttttgggagactgcagcaaggaccggcaatttttccagaacaactgttctttacttggaagacctagttactccccatctctccctgggacttgccaggggaccccagcatggcaaccttaatgatggttctgctgggtgctagtggttgctggcatgctagtttctgactcgagacaaataaattcagatccctagggtaagaccggcttcagcagcacctctcctgacaggggtcccgtctcaggagagaactgactttgtcccaagcagacctgggctcggggaatcctcatcacctctgcaagagttttttgttgttgctgttgttgtgttttgttgtgttttgtttttgtttttgattttttgaaatagagtctcgctctgaagcccaggctggagtgcagtggtgtgatctcggctcacttgcaacctccacctcccccaggttcaagcaattctcctgcctcagcctcccaagtaactgggattacaggcgtgcaccaccacacctggataatttttctatttttagtagagacagggtttcaccatgttggccaggctggtttcgaattcctgacctcaggtgatccgcccgcctcagtctcctaaagtgttgagattacaggcgtgagccaccacgcccggcctgcaggagtctttaagaggcaggaacaaggatgcaggtgtttcaacagagaggaagcctggggtgggcttcattcctcctcgtgctctttgcccccattcactcagtgctagaggttgtcattctgcctctgagacatccggccccctccctctccatccccacaccctcacctgccacagctgaaatccaggtgtgcctcagctcctggctgggtaccactgccactcatctgtagactctctaccctggtgccttcaggtgccaaagtgcatcctctgccatcagtcaaacacacagtttgacggatgtcacttgctctgctcagagacctgcaccgacacaggcatggtcaggttcaggtcttgtggacaagaactgggtctggaggagtcagggaagatgtagatgaggaaggtggtactgaaacgaacctctggtacagggaagatgtaccaggcagctgcagtcacccaggtgagagatggtagtcctggctggcccattctaagttccaaagctgccttggccatcggtctgagggtgggatggggggacatcagaaccagctgtctctgagaacataaagggacccccatatgggacctcaagacagctgagcagtcagaggcgcctctcccgtggcaccaggtcataggataatgagacttcttagaatttctttctttttttttcttttttttgagactgagtctcactctgtcacccacgcttgagtgcagtggcactatctaagctcactgcaacctccacctcccgggttcatgtgattctcatccctcagtctcccgagtagcacacgcaccatcacgcccaggctaatttttgtatttttagtagagaaaggattttgccacgttggccaggctggtcttcaactcctgacctcaaatgatctgcccacctcagcctcccaaaggactaggattacaggcatgagccactgtgcctggtcattcttagaatttctgacattcaccatatccgtttgttagccccactaagcaaggctgtttcaaattgactcagcatttcttatttgtcaatttctaccccactcctcacccggggacttctgaaaacagtgaaggcttcaaagtaatcaccttacaaagaagggcatcatcctcatttcacacatggggaaactgaggaccacagagaggaagtaaagaggccaaggtcacacacctgctactaagttccccgtccagtgctctttcagcaaaaatgcatgaggcacacaagtcatgtttccaaaccttcatttcagtaccaccttcatcatttttgtgttttccacataacactttactattatttatgacagggttttttttaaccactcaccttttttacttatctttcttttctttttctttaggagaggcaggatctcactctgttgcccaggctggagtgtatttcatgatcatagctcactgcagcctccaactcctgggcacactcgatcctcccacttcagcctccagagtagctgggactatagttgtgcaccatcatacatggctaatttttaaaaaatcatttgtagaaaaattagctggatgtaggagaatggcgtgaacccaggaggcggagcttgcagtgagccaagatagcgccactgcagtccagcctgggcgaaagagcgcgactccgtctcaaaaaaagaaaaaaagaaaagaaaagaaaaattagctggacatagtggcaggtgcctgtaatcccagctgctcgggaggctgaggcaggagaatcagttgaacccagaacccgggaggcggaggttgcagcgagccaagatcatgccattgcactctagcctggcaataagagtgaaactccgtctaaaaaaaaacaaaaacaaacaaaaaaaaccccaacaatttgtagacatagggtgtcactatgttgcccaggctagcctccaactcccggcttcaagcaatcctcctgcttcggcctcccaaaatgttggaattacaggcacaagccacctggcccagccatctactttatattcaaataaaactttacgtcccattataaagggaaaaaatggcaaaaacaggaggtaaccatttaacaagaaagcagagtgatgttagattatagcaagatactgttgactgtagaaggctctgaggctagagagctgctttctataaaacagagtgatcatatattagaagaggtgttaaagacatgttcacaccaagctgagacttcctccttgataccaccaggaggatgggcagagactggaaaagacactaactttctccctatgggagtcagtattatttagcatcactttggcgggtcaccccaaaccatctgactacaagggtaccatatttgggttaacactcttttggtataatttatgttttagtccaatgtcttgggatgaaaatgacaggtgggccacttatgatctccagagaaattcagggcaatttggtgtgggagtaggcatggtagaggagagcagcatctaagaagtccccagcagaggctctcagcttgtcttgaggcatctgggcggagggctatgatactggccccatcctgcagaaggtggcagatattggcagctggcaccagtgcggttccattgtgatcatcatttctgaacgtcagactgttgaaggttcccccaacagactttctgtgcaactttctgtcttcaccaaattcagtccacagtaaggaagtgaaattaatttcagaggtgtggggagggcttaagggagtgtggtaaaattagagggtgttcagaaacagaaatctgaccgcttggggccaccttgcagggagagtttttttgatgatccctcacttgtttctttgcatgttggcttagcttggcgggctcccaactggtgactggttagtgatgaggctagtgatgaggctgtgtgcttctgagctgggcatccgaaggcatccttggggaagctgagggcacgaggaggggctgccagactccgggagctgctgcctggctgggattcctacacaatgcgttgcctggctccacgccctgctgggtcctacctgtcagagccccaaggtaaaaaggccgggaaagcatcttaatttagcgtgcagtctcagctggtcctgccattccagataaacagagaaaccattctgaattggggatgggggtgaggatgggaacaggagtctgtgtcctgctggggcaggccattggaagatgtgaaagagttgtctatttccttccaccggagggagacttcaggtcagccaggtgtctggagtatgaaccatgtatcagcaccgaaaggttctagaagtcagactttcgggcagtgtgtcactaactctcagcatgctggcctggctcggcccacagcaaggtcttctcgcctccctttgggtaaatactgaggggtgcctctgcaggacgggacctctgccagactccactccatacccagagaagcagggaaaccaaaattggagtcagccttgaggtgtagctgttgagccctcagcagctggggagagctggcggatgctgccctccccccagtttcctaatggtgttgtttaaaaagggtcaggggacgggggaacagatggtgggaagagcacagtgcagacacctggcaccggctctgaaggcagcatggcagctacaccgttggctgggaagggtgtgcccctgaagaagtcgtttacattctcgagtcaattttcctggagtgtacaatggacctgtgggaaagcctgtatgaaagggtaatgatgagggacctagcacagtgtccaatattttataggaactggaattgagctcataggagctcaattttattggcattgctgttgttggatggttaaaggggtggtatcccttttctcagactcccctgaaatgtatggtttgctttgaacccagagactgatgacaggtctgccggtgtggttgggtgcagccttaagttgctacgggaaagtgttggagggggagaagtcagaggtaaccttgccccctccctcaattccagatgaggaaattcaggcctgaaaagggaaagtgaccacctcaaagtctcatgccttggaggacccagcaggaatccaagacctctgaaaaggaccggcagggctcttgccacggctgggggtgtggtcatggtaacacaggttttccatccatggaaggtacctgagggattttctcttcctccctagggccagcatcagaggagtgaatagctcagttagctcatctcaggggccatgtgccctcggaggtggtttgccactttcacggttggactgagttggagagaaacagagacccacccaggggtggggacaagctccctgcaactcaggacttgcagatcacttgcccaagtggctccctagctcctggctcctggcccggggcctgggactctccccgaagtggggctggccactgtgaggaaccgactggaggcagggacctcttggatgccccaggcagttgggatgccacttctgataaagcacgtggtggccacagtaggtgcttggttgctccacagcctggcccgagctcagcgctgcagaaagaaagtgaaagggaaaaagaactgcggggaggcggggaggtaggatgaccagcggacgagctgccacagacttgccgcggccccagagctggcgggagggagaggccaccagcagcgcgcgcgggagcccggggaacagcggtaggtgaccaaagtctcctctgtaacccctaaggtcgggctgagaatcgaggctccgagactgtcagctacttgctcaaggtcacacagcaagtctgggaggatggggggatggaatatgcaaaatgtagggccgggaaacacctcgtttccagcatccccgcaacgactctgcgcgggaaccaggagccgggaacccggagcttggcttgctgtgcccagagctccggggccgtgggcgggtggcaggaaagcctggcggcagcttctgcagagaagccggagcgcagactgggagcgcggagcagacacactcccccggccacccttggccgactccgcgcgcccgggatcctgcagaggtgcgcgcccttcttgtacgccagactttggaccagggccgccgttccctgagcttcactttccctgttgggtcatattccatctctaactctggaatcttgggtattgggctctccaggcggggggccctgctcagggaggcagtagggagccaaacctttaaccagaggatgggataagtcctcaactctcgttgaacatcttggcgaaggtgtgtgttgttgggaggggtgggggagggatccccccggactgaaccgatctcttgatctctcacttctctacctcgctttggggccctgagtcacaccctctaaggagagaggctaaagcgccccggaaagccagcgtgcgaatgccggggtgggagtgggagattggatctccctggggtccaggaaagccggaatcggagccaccatgcttagcttagtctggaactcttaaaagccgcggtcctcctgagtcccacagcccctctccaccctaggtggcacaggagaggtggcaaaagcctagaagttcaaggcatggctccctccccagccgcagcctggagtgtctaactttggcaggaagtcttccgtttctgctccccactccagagaaaaaataaataaatacttctccggagtgagattaaggaaacaggtacttcttcctcttggagaaagaggagccaaaggaacttgactccaacaaatgatcaccttgcaaacccccggctcccttaggggatgacctggtctccaacaatctcagagcgtttggaggcagggtctttggagatgactgagtggggaatcccaggctccccacacatgaacatcacctgggatgatcaacctgttcaggatgtaggttcccgggctcacccccaggcccggttggctaggcctggggtgaggctgagatcctgcaggttaaaccatctatcccaggtgactccaatgttcgtttgtggggcaaaagtccctcaagtcagagacactgggaggcgctgatgtggtctcatctctttactctctccctgttacaaaacctctatcagaaaaggagtaccaggaggtgttttgttttgttttgcttaacgccacatagcaagcagtttgcagacgcaggatttgaaccctggtctactgagagcccagcccagtgcagcaagcagatgtgaacctccacaaatgcagggcaggtcccaggcagtcagagagaaacctgttgatacccagtctgtctgatggctggggcttggtttcatgtcctaagacccagcctcagataccttgagaagagcagaatcagaaattaacccaaggaaactctggattagttccaggcaatcagggaagtggctggagggaggtaggaaacttctggacttagcctcagatttgccttgagtcacactgacaagtgacttcccctctctgaggttcatctgtaaaatggataaaacatgagagcttgcttgatgatgtctgatgtgtacagaaaaagcactttagaaaaccaccaaagaatattcatgcattgggaataattattatagatcctaaagggattgtttagaaagatcagagaggggccgggagcagtggttcacacctgtaatcctagcactttgggaggccgaggcgggtggattgcttgaggccaggagttcaagaccagcctgggcaacctggagaaaccccaactctactaaaacacttttttgtgttttagccgggcatggtggtgcacacctgtaatctcaactacttgggaggctgaggcacgagaatcacttgaacccaagaggcggagtttacccgagaggtggaggttacccgagagctgagattgcaccactgcacgccagcctgggcaacagagcaagactgtctcaggaaaaaaaaaagagagagaaaaaagtcagagaggaaagcataggcagatgggaggtttccaaagaccaagacacacacagtcaaaagacagttcagaaaggggcattagttaccaccgattctcataggaaggacatagatagttttcagattccttcaatccttctgacatcaaggacaaagtctctgattttccctgatgtttgacagtgccctaatgcttgctaagatttctttttaacaaagtggtaaagaagctgagattattttagtaacattgtttctttttcaaccacaagtgatactgttggtttggttttgcttttccgtttatacatggaaaaaaaagttttctttttgtaaaatcatggtaaaatacatataacataaaatttaccattttaaccactttcaaatgtacatttcagtggcattaaatatttcaaactgttgtgcaacctccgctaccatccatctccagaactttttcatcctcccaaactgaaactctacccaataagcaataactccccactgccccttccacccagctcgtggtaactccaacttcctgtctctatgttttgggctactctagacaccgcctataaatagaattacgtgatatttgtctttttgtgcctggcttctttcacttagcataatgtcttccaggttcatccatgtcgtgccatgtgtaattcctttctatggcggaatagtattctaatatgtggatatcccatattttgttcatccattcatttgttgatagacacttgggttgttcctacctcttgactattgtgaataatcttgctaggtacatgggtggacaaatatctgtctgactccccgctttcaactctagaaagctttcttttaaaatcggtctatttaagtttctttaaaaagttaatttaagaaaaatactaaggtaaattgtagaacaggtgatatgtcaatatgaccccaaaaattgtaaagatggaagacgaatgcctgcagtttgggaaaccggatgagaggaaagacctggaagctattgtaaaatctatgctgagggtctggtgactactagaccaagggcatggcagcagagggcagctgaaagacttcaggaaggaaagatataagaattaagaaaggggcctggtgcagtggctcatgcctgtaattccatcaccttgggaggtcaaggcaggatgatggcttgagaccaggagttcaagaccagcctgggcaacagagcaagacctttttttaggaaaaaaatatataaattaataaaaataaatttttgaaaatacagattccaggccgggcatggtggctcacacctgtaaccccagcactttgggaggctgaggccggtggatcacctgggatcaggagttcgagaccagcctgggcaacatggtgaaacaccgtctctcctaaaaatacaaaattagccgggtgtagtggtgcatgcctgtaatcccagctactcggtaggctggtggaggagaatcgcctgaacccaggaggcggagattgcggtgagccgagatcacaccattgcactccagcctgggcaacaagagtgaaactccgtctcaaaaaaaatgaaagaaaatacagattcctgggcccggctgcagactccctgaatagaatcactgggggtgaggcccaggacgctgtgtttttaacacccttcccaggtaattctcactcacagccaagcctgccgatggctggactccgtagtcagatctcagcaagcaggactggctcgtggttcatcttggggtctccagcacccagcagagtgctggcggggggactgtgttaagtagagccggatgggtcaggactggagtgtggggcctggctttgctaactgcagtcacaagatcctcatcactccaccccctaccccagcaccagggtcaggttcccttccaggaaaaacttgttggactcctttccaggtcattgactgcagttaggagtggcatgcagaagggaggctatctggagctgggacagaccaggcaagcggggaagggaactcttatcccaaccctgcattctggacagggaccgaaggtctcctggctgcagctcatacagctcatcttcattctcatcctgggaccaccaggcccctcacccacaataactttaccctttactggcaaatgcacaagctggagatgatggcccattcgagttttaagattttccaagttgttatgaggtcagtgtcctcaatcgggacccagagaagataggtggcttgcctgaactttcagagggggcatctgtggtgtcttttgtggggtcctgtaggatttccacgtccctcttggaggaaaaatagaagtaagttgtctcaggtcagattgtctgggaagccaagtaggagatggagatttgcatataggaggtttactggggacattcacaggagggaacacccgaaggaaaagggaagaaagcagggttgggaagcagcaggagttgaggtgcaatgcagtcacaacagaggtcttagccaatcccatagggagcactcaagctgggacagcaaggaagctagaccttcacatccctcatctacctccgtcctcccatacaggcatagcctcccccatgatgaacactcagcaccagactgatacatttgttataatcaatgaacctacattgatgcatcattattacccaaggtccatggtttgtttacatgagggtttactcttggtgttgtacattctgtgggtttggacagatacatgatgtaatgtatatgacattatagtatcacacagactcatttcacttgtgactgagcttgtccttctttctttaacctgcctccaactgctgagaagccctttggctagggattgcagccaattttaatttgttttccactttcctgctctgaagttactttgtttgccagaggctggttggttcaaacccaaagggcagggagctgcaatggaaatccattcaacggtgctggaattgggatggcaaaaaggagcagcaggcaggtgtcagcagggagcagctctttgcatcccacagttcccagggagcttaccattctttcattcattcattcatcctttcatttatgagacaaagtctcactctgttgcccaggttggagtgcagtggcacagtcattgctcactgcagcctcaagctcctgagctcaagccatcctcctgcctcagcctcccaagtagccgagactacaagggcactccaccacacccagctaatttttgtatcttttatttctgaagagatggggtttcactatgttgcccaggctggtctcaaactcctggcctcaagtcatcctccctcctcagcctcccaaagtgctgggattacaggtgtgatctcagacagcttacctcttaatcacctttccatctgagctggcagcagagctgggaaagtgcacccaacaccccagatgctgcaactttagtgcttcctgctccttctctgtgtggaactggcctgtttgggtacccagggccagtcccctccaagaccctctgtagaaaaagaccctactgtacacctcaattccattgcaggacaggacataattgaatcctgcctctccctgccccagtcacccatccctcccaagccattatcttgggacctgcaagggcctccaagccaagggtggcaaatccaaataccaaaggggccataatgatgtaaaatgtgtccaggcagaaggcaatagggagtagtggggcctctggtaacaattgtgtgtactctatatagagacattgtgatggtgatttagacacacacacacttatattggcttgggaaacaaaacaaataggcctatcgactggattcaacttttgattttgcagccaagcccctgtggcacagctgaggagcttgcaggtcagaaaggggatttagagccaaccaatagcaatatctccagacctctcctgacacgaagctcatctgacctcctgcccccattacacacatacacatgcacacacatgcatgcaggcacatgcacgcacgtcttctagtctccctgccttgaggacaaatgatcagatcctgcaactgtttccaggcccataagcccctgagcattgcagtgttgctacatgccttagtttcctctccgtctcctgtgacctcctcgtgccactccaggaagtgaaagtcttgagtgagaccagtagtttctcttaagtcctctctctgtctcgttctcctgggatatctacacttggtttgcaaacagcaggctggagagtgaggggcttcttcctctacatccagctcctcccccatcctgctccaagtccagcatgttcctatctcttccccaggaccctgggctcttgggcacaaatcaagccatcaccagacagcctgtggggtggcaagagcagaggtttgtttctttgtgaacatctataggtaccaggctctgtgcaggccctattgttggtgagccatagaggtaccaacctcaccccatgaatcctcctttgtttcttttcttttcaacccctgggcctttaaaccttcgattaactgcccagtgcagcccaggtcatggtacactatgatctttggttcacatgagggttttctcttcattaatgtccctatttcccatactgggtgcccattctaatgcatttcaggtgtatctttctgtttgtatgtgctcttataaaacatgttttgccttttttttttttttttagatggagtctcactctgtcacccaggctgagttttctatttttagtagagatggggttttaccaccttggccaggctggtctcaaactcctgacctcaggtgatccacccgcctcggcctcccaaagtgctggaattacaggtgcgagtcaccacgcctggccacagtttcttacttttgcattctgtactatgtttttaggatctacttgccttgcttctgatgcatttgatctttgcttctaatcacggacattgttctctatggagtgcaggggttacttttcacctgtccacacccccagtgatggacacctaggtgacctccaactctctgtcaccacaaataacacagcagtaaccatcctcagatgggttctcctggggagttgtgggaacatttcttcaggatatatagacccaagagctgaattgccaggtggtaggatctacatatccttagatattctacatgatgccaggtcgttctccagagcggccccatccatctacattcccacaaacccgtgtaaccaacacttggcatttcccagatgtctaacttttgccagttgtacagtatcaagtgtcactttgctgttttatttttggagtttacatcttagtaccacttactcgctaagtcactttaggtaagtcacaacaacccagtgacataagcactgtgccaacaaaatgcagtcgattctgtgactcagagaggttgagtaacatttgcaaagtcacacagcaagtgtggaactaagatttgaacccagagcctgcacccttaaccactatgctattattatgttttgtctctctcctaaaatatcatctgggtctacattgcaagcctctttggcagggactgtgtggtaaacctctttggggccagtaaggaactgagctcagtgactttcttacggggtgctcagtgaatcattgttttacagctttagaggggaaaagtgagagatgtttcttagagtttatctggaggactacagggtgcatgagcaaaagcggaactcatttgagctactacccccacaaagaagctgtttggggtctggtcatggtagataggcattcctaggcccctggcttcccaacaccatttggcccccggaagcagcttgtcatgaggttggggagcaggttggtgttggggggggccttgggggaaaggaaaaggagaagactgccaggcaacgaggaatcagaatctcaaaaagactcaattgaaggggctccaacactcgttgaaacggaggctcagagggctaaggtaatgtactcaggatcaaaggcagagcagaaactcaaaccatgtctctaggcacacagttcagaggtcttcccattattcctcaggaggagaagttcatggtcaagagtagggaagtattccttctcaagctttttttttttttgtctgagacagagtcttgctctgtcaccgaggctggagtgcagtggcgtgatctcggctcactgcaacctccgcctcccaggttcaagcaattttcctgcctcagcctcccaagtagctgggattataggcacccaccaccacgcccagctcatttttgtatttttgcagagacggggtttcaccatgctggtcaggctggtcttgaactcctgacctcaagtaatccgccagcctcggcctctcaaagtgctaggattataggcgtgagccaccacccctggcctccttctcatgctctttaatcacagttcagagcagtgctggaggcttttaggggtagcaaaagagccttcttctccctttcagtgcctccttagaccctcaaagatagactccccgcctctgggaagaaaacatctaatgaactggacgtaatctcagcgcctgcgtctgtaaaatggctataataacaacaatctcccagagttgccgttaacagttgaaacagaatagtaaatgcaaggcatctagcacagccccagacacagagaaatctcccctggtcactctcacagaggtaagaagcacattaataataaaaatggtcatcacgcatattgtactcaccatgcagaagttgtgctgccttaagctactgttcattgagcacttactggtcgccagtcccctttctaagggctccatgcaacttaactcccctaatcctatgagttgccaattattatcccccactttacagataaggaaactgaggctccaagtggtttaaaaaatgaacttacccagattgtagtgcgttggtaggtagggataacctgaaagttgggaaatttcaccccaaagctcaccatctgagctccattcatctcccaccagctgagatggaacgttatgctgttcccagaagagatgcatgcactgatcttcagatagtttaagtctgagttagaacattgtggcgacacctgatttccctcgggggagagagaggtgaattgttatttcagacacctgtttagtgtctacacttagcctttcaaatcctgcatgcagtgtgaagtggggatgaaaataaaccccaaaaaggacttttgatggcaaaaagatcaggaatattttctcgagttggatgtggaaggtggtggcccagggggaagcacagtttcaaagaggaccttctaaaaatactgcccatttaccaaaaagacacagaccgcgcctctgccctgcccccacatggctcctcaaaaggagaaattgtcttgccacccacgccttccctcgccggggtgctggggggccaacagcaattcaaaaaggctatagagtgggctgagactttggagatgggtagtttggttcaaatctcagcccactaatccctctgagcctgtctcttcatctgaaaaacaggaatacaaatagctgatgtgtaagttagaccaaatggggtaatgcctacgagtcatgtcatttggtacctggcacttgctggacactgtgaattctagttctatatcattgccacggatgaagagaggctgccatgcgcagaaacatgctgagagctgggagaaggtgagctagagggatacagtccctgccctcagggagagctgaagggctctctctcctgccacgggatgatcagggccatcttttccctccatcccgctctggcaatgtggtttggagaaacagtccaatgaaggggcctttgaagcacttcctaagcatctatagacataggaaacttggctctggggatagaggaaggtcccatgccaagattcaagtagatcttggtgtgactgggaggcagctgtggcgttgtggggaaacctagagtcttgggcctgaatttcagctttgacaccctctaatgtaatgggcttcctttgactgtaggcttcccacatagctggcaccccacacagaactcccttggccttctgatgatcctgcaggacaatcttttttgttttttgttttttgttttttttttgagatggtatctcactttgtcgcccaggctggagtgcagtggcgcagtcttggttcactgcagcctctgcctcccaggttcaagcgattctcctgcctcagcctcccaagtagctgggattacagaagcacgccaccatgcctggctaattttgtatttttagtagagacgggatttcaccatgttgcccgggctggtctcaaactcctgacctcaagtgatctgcctgcctcggcctcccacagtggtgggctgcaaggcaatcttcattctccagaactaatattgggaaaactgatgttcagagaggtcaagtgacttggctaaggcatcacagccagaattcagatgcaagctcctaaaccacatgaccttggacaagccatttcactgaggcgtgtgaacctcctctaagctcaaatgggcataacactctaccctgccttttccccagagctttttgggaactcagatggtgtggaggatggaggcagaagtccactgtgagctgcaaatccttgatcacccaagaggaagtgcttaaggtgcaggcttcagtcttagggaagcaggaagtggggcgctgaaatgtgtattgggggcttctgggagggggtttcttcttgtccaggttgagccaatgacgcagatcttaggccctctggtgactttttgcccaggcaacttctcagtggtggtgatggggagcgtggccagaccatccaagctgccctgctggctgtgggggccttttttttttttctgagacacagtctggctctatcacccaggctggagtgcagtggtgcaatctcagttcactgcagccttgacacctccccaggctcaagctatcctcccacctcagcctcctgagtagctggttctacagatgcacatcaccacgcccagctaagttttgtgttatttgtagagatagggcttcaccatgttgcccaggctggtctcaaactcctggactgaggtgatactcctgccttggactcccaaagtgctggaatttctacagatgtgagccaccatgcccggcctatggggcccttcttgttcctatgaagtctgcagggtccccttatgcaaaagaacagaaagctcggcttcacaaagtttgacctcggaagaaatggaagggaaagggtccctttgtcactctcacaaacgtaagaagcaaactaataatgatggccatcacacatattatactcaccatgtagaagctgtgctgccttaaacttctgttcattcagcacttactgattgccagtcccattgctaagggctccgcgtgacttaactcccctaatccttgtgagttgccaattattattcgcattttatagatatggaaactgaggctccaagtggtttaaaaaatgaacttgcccaggttacagtgtgttggtaggtaggggtagtctcaaagttggtaaattttacgccaaagctcacgatacttgccttctttcccttctcaatttatttctctgactgtgtgcttaaccacacagcagtgtcatccagagtttgaagcagagctcatcaataagtgggggtgggctaaatgtctccaggctcctccctgcggtccctcccaccatcccccatctgtgataccacctgtgtctctatgcttgagcccagacaggacaagggtgatcatttcattgggaacattttgactggggggaaagagcaccagcctgggagtcttggcagggggagtgggggagaaggggcaggggcagccaccgacaggctatgaggtcttgtgcaagtcacgtccttcccggggtctcagtcttgtcatctgcagagtgaaggaaagaggtcaagcttgaaggtccctggcagacccaatgccctgtgagaaaactgagtttgggtaacttattattttatagatatggaattatcttatagaaatgttatagatatggaatcattttatagatatggcccaaagtccaaagtcacacaactcattcacggagttgctaggatcagtctggagctcttgtcacgagatcacactgcctcaaagaggaggcagattgctgcaatgtaggttcttaataaagagcatgggtggaatgggaggcgggcatcaggcaggagctggggcaaaggtgtcttttctcactgctctgagagaacagattttgtgcctgtgtccctgaccaaggggctgggagaggtggagcatctcacccccaaccatctcccagctttggccctgctccaggaaaagggcggtggccccatctttcagttctgcttcctctagtcatggttggctgggatctcgctgcaagccggttatgtttgggttcctgcagcccccgctcaaccgtcatgaacaagtgggcccagccagtgccccagcttggactggaaagatcattctctgtgacatccgggggtctgtgctgagcctctccccaggcagtgaaagctgtggatgcgtgaaagaaaatgggtctctgggccgggtgtggtggctcacacctgtaatcccagcactttgggaggccaaggcgggtggatcacctgaggtcgggagttcgaaaccagcctgaccaacatggtgaaaccccatctttactaaaaataaaaaaattagccaggcatggtggcgggtgcctgtaatgccagctacttgggaggttgaagcaggagaattgcttgaatccgggaggcagaggttgcagtgagccaagattgcaccactgcactccagcctgggcgacagagtgagactctgtctcaaaaaaaaaaagaaaaagaaaatgagtctcaggaatggggtggcaagttgagtgtgtgttttctcatgagcttactcttcaatgtattctcttctgggcccagaacagggcagtaggagcctccctctggtcttccagcttcagggccagctctcctcttacctcctccaggaagctccctctgtttctttccagccttcatctgcatgtcatgtgtggtgggttgaaaggtggccccccaaaagatatgtccatgtcaaatccctggaacctgtcagtgtgactttatttgggaaaagggtctttgcagatagaattaagttaaggggctgggtgcagtggctcatgcctgtaatcccagcactttgggaagctgagattggaggatcacctgaggtcaggagttcaagaccagcgtggccaacatggcaaaaccccatttctactaaaaatacaaaaattagctggtcatggtggtgagcacctgtaatcccagctactcaggagactggggcaggagaatcgcttgaactgggaggtggaggttgcagtgagccgatacagcgccactgcattccagcctgggcaacagagcaagcctctgtctcaaaagaaggcaaaaaaagaattaaagatcttgaaatgacatcatcctggattatctaggtgggtcctaaatccaatgacaagtgtctttataagagaaagagacttgctacatgaggagtaggtgatgtggccactaaagctgagtttagagtgatgcagccacaagaccacaagtcaaggatcaccagtagttcccagcagctagaggaggcaaggaagcattctcccctcgagcctccagaggcagcgtggccctgctgacaccttggcttcaacttctggcctccagaaccatgagagaataaagtgctgttgttctgagctacctggatgctggtaccttgtttcagcagccctgggaaatgaatataccatggaaacatggacctgaaccacggatcctggcaggagccttagagccacacagatgagccttcagcttggctttccccagcaagagctacatgatcttgaggaagctgcttgtcttctctgggtctcaagttcttcatctgccaatggagacaataatgcttacttcctaggttttaacagctttattgagatgtaattcacatatacaatttgcccacttaaaaagtacagttcatgcctgtaatcccaacactttgggaggccgaggagacaggcggatcacttgaggtcaggagtttgagaacagcctggccaaaatggtgaaacactgtctctactaaaaatgcaaaaattagccgggtgtggtggtgggtgcctgtaatcccagctgctcaggaggctgaggcagaagaatggcttgaacctgggaggcagacgttgcagtgagccaagattgcacccctgcactccagcctgggtgacagagactccgtcttaaaaaaaaaaaaaaaaaaaaaaaaaaaaaagtagagttcagtgttcttttgggaatactcagagagttgtgtgaccatctcccatccccacagtcaattttagcacatttcatcaccccctaaagaaactccagacccatcagcagttgttccccatttccttccaaaatccctctctgccaagccctaggcaaccactaatatgctttctttcttaaaaaaaaattaatagagataggcttttgctatgttgcccaggctggtcttgaacacctgggctcaagcgattctcctgtctcagcctcccaaagtgctgggatttcaggcatgagccaccacgccccacccctcctactttatgtctccatggatttgcctgttttggtcatttcaaataaatagaatcatacaatatgtgaccctttgtgtccggcttcttcacttagcattttttttaaggttcatccatgttccagcatgtatcagtgctttctccctttaatggtggaatactttattgtatagataagcaacattttgtttatccatttattttttggtggatatttgggctgtttttatattttggctattttgaattatccttctgtgaacattcgtgtataggtttttgtgtggatatatctggtttttcttgttttcttttgttttattaatacataatatgatacatatttatggggtatatgtgaatatttattacatgcatagaaggtataatgatcatgtcaggatatttgaggtatccacatttgggattgtttaaagattaaatgaaatagtgttaaaagtatttaatatgcccttcaacaaatgatgaggaaatcttagaatctgctcagactccttcagtttacatattaggaaactgaggcacagaaaggagcagagacttgctcaagtccacccaaagcagtagagcattgtggttaaatgcaggacttcagtcagactgtctgggttcaaatcctggttccacttggacatgggtttccttacataaatcacttcacctctctgagcctcagttttctcatatgcaaagtgaggataataataataccttccttacatggttactgatatgagtattaaatgtgccagctcatgtgcctggcgtataggaggtgctttataaaccttagctgttaccactcatggcattgccaaatgtgggacgggtctcctgactctctggtgtgagattgatggaatccacactttccagttcccttttctacctcctgggtatcttctcatatggttgtaagttccttggaggaagggaatgtggcttgctctctccaccacgctgagcatataagaggtgctgaatgagcgcttttattcactcctctcatccccagccctcaccagctgggagttgttgtaggtgtcaattttctgcctctttccaacaccctgtgaggtgactgagcattgtcttccctcccaggcagctcacagtgtgccaccatggagttggggcccctagaaggtggctacctggagcttcttaacagcgatgctgaccccctgtgcctctaccacttctatgaccagatggacctggctggagaagaagagattgagctctactcaggtgggccctcctccctctggtctcttccggtatcccccacccctcagcttgctgtagagacggcaatcaggggaaattctggtccctgccctcccgtcagcaccacggacagctcccacgtctgtgggacgctctctgcagatggggatgatctcccagccctgccccgcctctccctcgttccccaccagccctctttccagaaatttccttcttcatccaagggacttttcctcccagaacccgacacagacaccatcaactgcgaccagttcagcaggctgttgtgtgacatggaaggtgatgaagagaccagggaggcttatgccaatatcggtgaggaagcacctgagcccagaaaaggacaatcaagggcaagagttctttgctgccacttgtcaatatcacccattcatcatgagccacgtcagtcccctcccacagaaatcattgcaagggggatgcggagcaatggctggaggaacggagactccagggaagagaggggagatggaggccagtgggggaaataggccccttcactaatgaccaccaagaaaacaaaatctcatgtttacatcctccacctccatttctatacgcatttctgcttcttgctcttctgtccatcctttctacaaagcccataccatacacccctttcccttttcctcccagctccttagccaagctactctagtatttgtaataactagcatttactggatactcatagtatgctcattgctgtccatacattatcatctggaatccttacaacaacaaaggaaatacatattattagtttctgtcttttacaaatgaggaaattgaggtttagagaggtgaaacgacctacccaagtttgcattagagatagtaatgtacagatctgaaattctaacctaggtctttctcgtttcaaagtctccatttttaaccacaaaaaaagaaagtgtctggggttggaagatttgctaaggcttaagcagagaagctaatttgtagccttaagaagagctacagctttcagacaagggcaggactcttggggagaggtggtggtggtgttgctgctagtggtttgttttttgggggagagacgtgggatagagaatctcttctcaccagcatcaccaccacctcatacagagcctatgttgaaatagaaaaaagtggcctttttctggaggatgcagcccctaccaggaagtaactgcttggctagcaaagtgcaagccggagtcctgcccccattttccttgttggcttgggcacctgtgtgcagtgaacaacctgcaaaactcttcttagtggtcttcttcctgccaacccaggaacagcagcattcagcagttctgtgcttgatccaaatgtggccaatttttccccagagcacagtgtattgaaaatcataccaaggaagaaaatggaggggactagtaattgttcatgtttcagaaattacagaactgagagcttgactgcttccttcccttcctggggatttacatgggggaagcagaagtgattggggctgaggacattcacatttcctcacaactggaggcagtcattaaggatttgggcatgtcataggatttgggtgtttttctccccccttagtggcatctccacaggcagcgaaagctgtctaagcaaataggtgaggcagtgcgttagtccattttttgttgcttaaaacaacatacctgacactgagtaatttataaagaaaaaaaatatttcttacagttatggaggctgagaagtccaaggttaggggctgcatctggtgagggccttcttactggtgaggactctctgcagagtcccaaggcagtgtggggcatcacgaggcaagaggtttcggtgtgatagtctctcttcctcttctcataaaaccactagtcttactcccacgacaacccattaacttattaacctgtttatccactaatccatgaacggattaacccattcatcaaggaaaagccccagtcacctcttaaaggccccacctctcaatactgccacataggggattacatttatacatgagttttggagaagacaaacattcacgtcataacaggcagcttcacccaagtctgctcctcaagtctgtgggttttctctctgcttctggaaggtgaagcccaggcctgggcaagtattcttttgcagcatcctgaaatatgaccttagcttctaaatgtgtaaaatggagataataatcacacccaccatcacgggatggttgtaagactgaataagttacaatgtgtaaagcatttagaaaaggaatttgcacagagtaagcattcagtagatgttaggtactaccccacaaccaccgttatc

SEQ ID NO: 577 - protein, 258 aa, Homo sapiens
MDTPLPRPRPLLAVERTGQRPLWAPSLELPKPVMQPLPAGAFLEEVAEGTPAQTESEPKVLDPEEDLLCIAKTFSYLRESGWYWGSITASEARQHLQKMPEGTFLVRDSTHPSYLFTLSVKTTRGPTNVRIEYADSSFRLDSNCLSRPRILAFPDVVSLVQHYVASCTADTRSDSPDPAPTPALPMPKEDAPSDPALPAPPPATAVHLKLVQPFVRRSSARSLQHLCRLVINRLVADVDCLPLPRRMADYLRQYPFQL

SEQ ID NO: 578 - DNA, 777 bp, Homo sapiens
  source 1..777: mol_type = genomic DNA
atggacacacccctgcccagacctcgtcctttgctggctgtggagcggactgggcagcggcccctgtgggccccgtccctggaactgcccaagccagtcatgcagcccttgcctgctggggccttcctcgaggaggtggcagagggtaccccagcccagacagagagtgagccaaaggtgctggacccagaggaggatctgctgtgcatagccaagaccttctcctaccttcgggaatctggctggtattggggttccattacggccagcgaggcccgacaacacctgcagaagatgccagaaggcacgttcttagtacgtgacagcacgcaccccagctacctgttcacgctgtcagtgaaaaccactcgtggccccaccaatgtacgcattgagtatgccgactccagcttccgtctggactccaactgcttgtccaggccacgcatcctggcctttccggatgtggtcagccttgtgcagcactatgtggcctcctgcactgctgatacccgaagcgacagccccgatcctgctcccaccccggccctgcctatgcctaaggaggatgcgcctagtgacccagcactgcctgctcctccaccagccactgctgtacacctaaaactggtgcagccctttgtacgcagaagcagtgcccgcagcctgcaacacctgtgccgccttgtcatcaaccgtctggtggccgacgtggactgcctgccactgccccggcgcatggccgactacctccgacagtaccccttccagctctga

SEQ ID NO: 579 - DNA, 6486 bp, Homo sapiens
  source 1..6486: mol_type = genomic DNA
gggtccaggagcggccgtcccaacacggggcgcttgcacacgccgacagacctccttggaggagccgctcgcagggaggacaagcccgggactccgccccccgccctgccacgagttccaccgcgagataagagggcccttccccaacgacgcagaatgccagaaggcaatctgggcgcgggttgctgagcccgggcccctccttaacttccccgacccggtctttccccactgatctctccgacctgcccctctgggtagcttcagccccgggtccacgcgctgctattggccctccccgaccgctcggctccaccttcagcgtcgcgattggtcagctcgcggggccccgccccgttttcctggaaagttcttggaaatctgtcaaagtatttcctttcactgctcagggccccagacccggcgacggggcccgcgcaccccgcccgggccccaccgctcagcccgcggttctaggaagacgctgcttccgggaagggctggaacgcggcagacaaaggattaggcagcagctcgccccgccccgctcgtctggcccgcccccctcgccctcgcaggcggtccgcgccactgcctctcagtccctgtcctgcgcccgcgcgccccgggagcctacccagcacgcgctccgcgcccactggttccctccagccgccgccgtccagccgagtccccactccggagtcgccgctgccgcggggacatggtcctctgcgttcaggggtaagcgcggctctctgcccccttcccggccaccacgaggggcgcacgggagaacaggggcttcgtgctagctgccgggcattgggagggcttgacgggccagaggtgactgagcgcagacggacctcaggagcaaggctctgtgtggggctgtgacactcccactccccgcccccacacacttacctcaattcccactgtggattgggaaaccgggggctggccggctaaaggaggaactcacagggtgggctcagcctgggttctcattggagcagatggatgctaacggcacggcgtcccccaagatgtggccaacaatcccagatattcttctgggcccagagcactctacgctagcctgcctgctgccctgcctgctagtaaccttggaccagcccctggccccctctgtcctggtgtcccctctcctgccccaggctagcaagtaggctcttcttgggaagccagccgcagatccttgcctttcctcaggctggcacctgatggtctgcaactctcgggaggccctgggtttggcctggtcctgcttggggtacccccacaatcgtctcacaaccctgtctcagcccagtctgggatcccaatgtgagaaggaccttggctcctgcctctcatcttcaaatttcccagacttgaggtaagggacagtggagaggggatgctgataagacagagtcttgacctgagctgagcattcctggccatccactctgtcctgaacctcagcaaccccttcaaccaaagggtctgatgctggccatggtgatgtgacaggagctcaggaagctccaaggagagaggaagaaggtataaatgggtgttctgcactcagggaggactgggtggctgtgcttatcgcaactggcctggtgccaagtgagggagggtggaaggtgaggccaaggaagaggacatggaggtgctgggaagactacttctcccttgctgtctccagcaagttccttcctcctgtctgcattctgggactcctgaatacctgccccaccactgccttccaccccaggagcctccccctgcattccggggtcccatagcctctttcactttttaccctaggtgagcacccccttgtaagctcagggctactgttgggtgtcagggaacaaagttttagactgctgcgctccaaagcgggcacacacatgtacctagaacacaccagccactgtccccaccatgatgatgacacagccatggacacacccctgcccaggtacacactcaccaggagcttgtggtgatcaacacagctattcatacacccagctaccacatcagccccaaaggtgcccacacctacatgtgggatctgaggaccggctaagctatctggacgtggccacccacagaggttccagcctgactggctagccaccaaccatgctcctgggaaggtagctctgggccccagcaagcaggtcatctcaaaatttggcctccagctctccaagagggatttccaagatcccacagtacagccagggtaggtgtggaaaagtttttgtcaggctgtggtgtgccagagttgtgtggccctttctcactgtgagtggtcatagggccatgatttgttagaacctagagggtcacctataacctacacaggagtcaggtctggctcctgccaccagctcctgcctgcgccttcctgcctcacaagcaatactggcgctgtttgcccatgctgtcctctctacctggggtcccttcccccagctccttcctttggcctggaagacacagctcaggagcaagcagaccctgactcccccgtgacacctgcagttttatgactttgcattataattactcttagtgtcatcttccccagccagtctggttctccttgagggcaaggccatggtttcattatggcggtgtcctgaggcccagccagggactagacccagaactaaggcttggagatgtattttgcaaggagtgagggaggagcagctgtcttcctggggaagtagagccagtccctgctgccctcccaaggaggaagccctagtatcaccctgctgggtgggcttcccctaggagaaagctgctactcagattttggtcggctcagttcccccaaccccagccatccaagaatatggtgttactgaacctctcagtgcatgggttggtgggaccctttattgcggaaaagggaaactgaagcccagtgaagagcaagctttgtacaagatcgtagagcctggtagggctggcttgccagggtgggaactggagtgtggattaggtccctgcccttggtgggagctcatactgacaggaggtgagacttgccagtgcctttagaggccactgtccaccccagaccctccactgggagaagcagaggccaggataggctgacttgtatgggtaggggattatttcagtctctaagtcctggccagtgtggacctaggtccctctgagagacactcctatccatggggaggtagcgtgtgacctcaggcagcctaccataatcctggggcttctctggaggaccccacacagatctatcataggataaatctacttgtctgtcgtagatctatctcaactaggaccattcatcagtgggccatttaatcagcccacttcagccaggagggcacaaacatgaagctactttgcactgaatcctatcagtgtggtgagaacattagacatgcctatagggaatgatctgtgtttttggttgatataaaatagagagcaattaattactgtttagtaaatgcagggcagtggaaaagaatctttcaaaagaggatccccacatggaaacaatcaaggtggcttttgtgatgacaagtggggaacgagatactggactaactgagcccatggctgggtagaggggaagctgaggctcatagtgagatgggccagccagaggtcatgaaactagtctggggcataggggggtctctggagatgggggaagcatgggtcctccactcactgctcatccactgccttctagacctcgtcctttgctggctgtggagcggactgggcagcggcccctgtgggccccgtccctggaactgcccaagccagtcatgcagcccttgcctgctggggccttcctcgaggaggtggcagagggtaccccagcccagacagagagtgagccaaaggtgctggacccagaggaggatctgctgtgcatagccaagaccttctcctaccttcgggaatctggtgagtctgaggggggaggcaggccttttcctgagtagtctggtgggagaagcttagttctgcctttgagtctgatttgggaggcatagcccggcccaggagagtctgatgggagaggcacagccctctctagggaagcgtgaagctggaggcactgccttgacttgcactggattggttaccccagctaatttccactatgtcccttggccccctctgcacttgcctaggctggtattggggttccattacggccagcgaggcccgacaacacctgcagaagatgccagaaggcacgttcttagtacgtgacagcacgcaccccagctacctgttcacgctgtcagtgaaaaccactcgtggccccaccaatgtacgcattgagtatgccgactccagcttccgtctggactccaactgcttgtccaggccacgcatcctggcctttccggatgtggtcagccttgtgcagcactatgtggcctcctgcactgctgatacccgaagcgacagccccgatcctgctcccaccccggccctgcctatgcctaaggaggatgcgcctagtgacccagcactgcctgctcctccaccagccactgctgtacacctaaaactggtgcagccctttgtacgcagaagcagtgcccgcagcctgcaacacctgtgccgccttgtcatcaaccgtctggtggccgacgtggactgcctgccactgccccggcgcatggccgactacctccgacagtaccccttccagctctgactgtacggggcaatctgcccaccctcacccagtcgcaccctggaggggacatcagccccagctggacttgggcccccactgtccctcctccaggcatcctggtgcctgcatacctctggcagctggcccaggaagagccagcaagagcaaggcatgggagaggggaggtgtcacacaacttggaggtaaatgcccccaggccgcatgtggcttcattatactgagccatgtgtcagaggatggggagacaggcaggaccttgtctcacctgtgggctgggcccagacctccactcgcttgcctgccctggccacctgaactgtatgggcactctcagccctggtttttcaatccccagggtcgggtaggacccctactggcagccagcctctgtttctgggaggatgacatgcagaggaactgagatcgacagtgactagtgaccccttgttgaggggtaagccaggctaggggactgcacaattatacactatttatttatttattctccttggggttggtgtcaggggcgagccaaccccacctctatgccctgagccctggtagtccagagaccccaactctgccctggcttctctggttcttccctgtggaaagcccatcctgagacatcttgctggaaccaaggcaatcctggatgtcctggtactgacccacccgtctgtgaatgtgtccactctcttctgcccccagccatatttggggaggatggacaactacaataggtaagaaaatgcagccggagcctcagtccccagcagagcctgtgtctcaccccctcacaggacagagctgtatctgcatagagctggtctcactgtggcgcaggccccggggggagtgcctgtgctgtcaggaagagggggtgctggtttgagggccgccactgcagttctgctaggtctgcttcctgcccaggaaggtgcctgcacatgagaggagagaaatacacgtctgataagacttcatgaaataataattatagcaaagaacagtttggtggtcttttctcttccactgatttttctgtaatgacattatacctttattacctctttattttattacctctataataaaatgatacctttcatgtacagagccctcaatggggccgattttcagttgtgtacacagtgtgtcccctttgatcttgttatcattagcccccatttgatatttgggctagcggagaggcccagaaattctatgtggctgagcagtccctgctggggactcattaaggagtggaggagacagggagcagcctctcctctcatctcccctgggtccccttgggaaatgggagctaggagacaaaggccagttagactgcctgcagggtgactgccctggccactgccaggcgagggctcgggggagggtggcagaggtgcatcagccctgagagatgtgtaaacaagaaatgccaactccaaatcgcaagtggagaatacccagggagagagagctgtggactactcctggggtcagtgtcttgagatgaggaaactagtagtcagagaagtcagggctggttctcccaggaagaaggtacagtgagtgcaaaggcaccaaggcatgactgggaggcacgtgttcctgacacacagaactgaagagggcttgctctgtgcagtggggcagggcaattgaatcggggtaggggccagtgagctggcagagtctgacctggg

SEQ ID NO: 580 - protein, 260 aa, Homo sapiens [sequence omitted]

SEQ ID NO: 581 - DNA, 783 bp, Homo sapiens
  source 1..783: mol_type = genomic DNA
atggccaccccgcccaagagaagctgcccgtctttctcagccagctctgaggggacccgcatcaagaaaatctccatcgaagggaacatcgctgcagggaagtcaacatttgtgaatatccttaaacaattgtgtgaagattgggaagtggttcctgaacctgttgccagatggtgcaatgttcaaagtactcaagatgaatttgaggaacttacaatgtctcagaaaaatggtgggaatgttcttcagatgatgtatgagaaacctgaacgatggtcttttaccttccaaacatatgcctgtctcagtcgaataagagctcagcttgcctctctgaatggcaagctcaaagatgcagagaaacctgtattattttttgaacgatctgtgtatagtgacaggtatatttttgcatctaatttgtatgaatctgaatgcatgaatgagacagagtggacaatttatcaagactggcatgactggatgaataaccaatttggccaaagccttgaattggatggaatcatttatcttcaagccactccagagacatgcttacatagaatatatttacggggaagaaatgaagagcaaggcattcctcttgaatatttagagaagcttcattataaacatgaaagctggctcctgcataggacactgaaaaccaacttcgattatcttcaagaggtgcctatcttaacactggatgttaatgaagactttaaagacaaatatgaaagtctggttgaaaaggtcaaagagtttttgagtactttgtga

SEQ ID NO: 582 - DNA, 32668 bp, Homo sapiens
  source 1..32668: mol_type = genomic DNA
taagtaaaagtaatatatacaaaataattgcataacagaataatatagggcagttacatagaatgattcttgctgtttaatcctggaaaatgtgatccccgaggattcacattttaatttctgctctttatttctgaggatggagtcaccgttttccccttctggctacacatttagatgcatttcaggtctgatgatagttgcaatgtaaaaaagaatagcaaggcctttggtttctgtagacaatttggaccagataacttccagactgggtaatatccggtttattagtgttactggatgggaagtcttgactgagttgtctgggtttttggcgtgttgaacaaagaattgaacaaaacgtagaaacaaagcaacaaaagaagcaacgaaagacaaaacaacaaaagaacgaagtaacaaaagcacaaatttattgaagcgaaccaagtgcttcaagagtcccaattgcagtgttcttaagggttactaggctaaaagaatttggtaaatccctaggtgccctttacagtcgtccaattggttgcaccctatgaaggattggcctgcgaccaatcagaggctgaaatggagatggccgaggacaatcagaggcgatgtggaaacttctgtcttgtaatcacaggagtgaaggtgtggcctgtatgctgcctagtcttgcctagaaattgctgcacctgctgttcttttgcttatgccttaacccttggttaccctaattccctattctcttgcctcattaggtctttaccctgactaaaaatgcactcatctagctgggacaaatcctacactgcatttgtcccatctagatgagtattctagcagagtacatggcacatgagtaggcattcaaaaattcaacatacagtacattttgttacctatgtgccaggtgtcgggcaggctgagttaacagctgaacagaaacctacctacccaacgtgctaacttctatacagcatggtcgtgcatccaaatcaaatggaaagcggtatgggagatctggaaaggcctcctgtgggtggcatctgactacctaaattcccatcccagtttcacttactgactttgacacttggaacaagcagcctctcagtgcctgttttcccactggcaggtaaatgggctaatgacggtatttctggcactagacttcgttaattaatgaaaagcacatagaagaaaacagcctggctctctaagtgggcagtgcgattcccaaggacggcacttcgcctgatagtcttcctctaggctgagaagccagagtaaatccatttgattttcctaccacacagtgccttctccccagatgagttcaaagctttaagtctatccagttctgtccagacgcgtctgttcatctccaacaggcccactagagaggcgggttttccaaagcctggcacggcccactgcaggtgacgccctctgccctccagcgccctcaggcctctggggtccacccttcctccccacccgactccggaacctcttcccgcgccctgcccgggcgcctggctgcttggggtagaggccttccgccacacgcgcggccccgccccggccttcacgtgacctggcgtgcggagcgcgcacgcgggaacccgcgctggaggcgggcgagggccgaggggcagctagggagcgcggcttgaggagggcggggccgccccgcaggcccgccagtgtcctcagctgcctccgcgcgccaaagtcaaaccccgacacccgccggcgggccggtgagctcactagctgacccggcaggtcaggatctggcttagcggcgccgcgagctccagtgcgcgcacccgtggccgcctcccagccctctttgccggacgagctctgggccgccacaagactaaggaatggccaccccgcccaagagaagctgcccgtctttctcagccagctctgaggggacccgcatcaagaaaatctccatcgaagggaacatcggtaaggagcctccggaaatgtgggacgcaaggctggggtgtcgcggcagtggctgaagcttcccttcgccgcatctctctgcagcaactcggtgagggctttccctccagcctggcggtgtggacgcggcctcggcttcctttcccacccagagcatccttcccttacctcccgctccacggggtgactgcggtccccggggtcagactgggcgccaggcctgcggtctctgtgaggcgcgctttgaacctctgctccctctttgttgggaactcgcaaagggaagcgggggaagggtattagatttcttgaggtgtaacttacattaaattcaccctttttaggtgtactcttctatgaggtttgacaaacattatgccttttgctatcaccatgatcgagatacagaacattttcatcaccttagaaagttcctacctgctcctttgtattcagccccctccacccttcctattccctggcacccactgatttgatttctatccctgcaagtgttgccttttccagaatgccatataaatggaatcataggctatatcgccttttgtgtctggcgtctttcatttagcataatgcttttgaaattcattcatgttacttgtgtctgtagtttgtttctttttattgctgagtagtattccattgcatggatgtaccatcgtttatccattttctagttgtggacctcagggttgtttacagttttttagctatattattagcgaagcattgttttagctatattattaacgaaactcgaaacattcgagtacaagcaaagaggtctttaatgatcttaatagcatggagttcctcaccccttactccacatccaagtaaacattggattatgattcaaagaccactaacgtttctgttaactcagatggggggcagactaggccatgcctgtcactttgcaagatacacaccaacgtccgattcttctgtatctccaaccacaggaaacctacccctgaaacttcctgttttgatagatttaaaaaaaaatttttttagctccaggttgggtgctggtcattcatgcatacagcaaattttttaaaattcttaccacattcaaagcactgtaccttcttgaaaaaggccaggcaagcagatgctttaagcattcaaatgaatagaaaaactgcattctcaaagaggacttcttatttcattgctccagaattaaagcaccagtagaaagaccatatgatataattagcaatgtaagttatttgagggtgcatgtttactagtatggaatctctgacagctgcttactgaataaagaagaccatatataaagacaggagaaagtggctgaacaaagccatctgaaaagtaaatttgaggcagggcatggaggctcatacttgtaatcccaggatttggggaggcttaggcaagaggatcacttgagtccaggagttccagatcagcctgggcaacatagtgagaactcatctccacaaaaaaattaaaaaattagttgcatgtgttggtgtgcctccagctactcaggaggctgaggcaggaggattgcttgagcccaaagatcaaggccacagtgagccatgatcacactactgcactctagcctgggtgacagagcaagactctgttaaaaacacagaaacaaaacagtaaagttgaatgaataacccctcggatcaataccacaatacattcatcccctttccctctctccaatccagttaggtagcatcatatttagaaatatttcctcaaagcatctttaatcttttcagcagctgaaataatttcctaatatatcatcccatctccagtttctcttaactacttctgcaacggtctttttgtatgcaaatgtcatgtgttatcccctgcttaaaattcttcactgattttgcctttacctacactgaaagtagttgtgaactgatagcctgcaattgcacaatattggcctgcacaggttgaaaaaaaattttactggccagtggctcaagcttgtaatcccagtgctttgggaggctgaggcaggaggattgcttgaggccaggagtttgagactagcatggcaacatagtgagaactagtctctaagaaaaataaaaataaaattaggccaggcacagtggatcacgcctgtagctccaactactcaggcggctgatgctgatgtgggaggatcacttgaatgtgggaggcagaagttgcagtgagctgagatggcaccactgcaccccagcctgggtgacagagtctcaaaaaaaaaaaaaaagccagttgtgttagcatgcacgtttagtcctagctactcaggaggctgaggtggagatctttgagacctatagtttgaggctgccgtgagctgtggttgtgccactgccctacagcctgggctacagagtgagaccctgtgtctaaagaaaaaaaaattaaatttgttgctaactcgaaaacgttttgagatttcccataaacaattagattcttggcttcttttgaaaaatctgaagatctgttaacaccgggcctgcatttctgtatgacaacaattggtgtttagatggagcatgttccttgccatttttcgtctccctgacactgagactttgttagttactgttcattattggtcttgcacttttgttcatgtctccttcaccttatttgccagatccaaataagctgtaaatgcacaaattgttaagctgtgcgtaaactattttgcaattcctctatttttcctagaatttgaactttacttggtcgttttagttttatatttatataacccatcttcttatgttctgtgttactcaaatgttcccttatgttagattgatggaggacttacctgcttctcatcttaatagtctgttcagaatgactttcagcattataatgcctgcttggcattaggaattctgttagtttccatgactttttaaagtattaacatcagtgtctttggttcttgttctcctttgccttcatagaaaattaatttattaattagcttattttctagctcccactttgccccaataagttaaggaactagatgtgttagtgtgattgggaactctagctgttattactctgcttgaactaaatgtaactgttattactcttagactttttaagtatgaccatatgaatttttctgcttgtaagcagtgtcagaagaaagttgaatgctgtagccttaagtgctttcagactctggtggatgcctaatttttttatttgttccttgggtgctatttctgaacatcatgttctcctttccctcttccatctagctcagtgaatgtggggtgttctttctatatgctttcacttccacttaacattcttctaaatgctgtacagtccctaagcttacactctccatactaaattttggtggccagtgtttttaccatgattaaatctcactgttatccagtttatcgttaaaagtttttctcctctcctctggatacagtttactttgtgtttttcttctaaactgtctacctgtgtcaccttctttactgcctcgctcctgttttttctctgtgtgtaattctttaaagttcttccaggtttttcttcttttctattgccctgtctaatgtcctagatttaaatatagttctgcaagtcaaaggtaagttctttctactccccatggatctaatttataaggaagaggaagctttgcttgtaagtatattgaagttatttatatgttcatctgtgtgtgtgtgcacgcacacacagggaaagagagagaacattatgctaaccagagatgtctaatacaaccacatttggtgacttcagatataaagggtgtggtggccattaggagtattacttctaggtcaagactgtccctactattaaatataatatattgttaaactaaacgtaataaaaaacaaatgtgcttaatgaaattgggcagggagccttttcattttcttctaaagaaatatgaagagaaagtttagaaagttgaatgttttgggctttttatgttgcttgctattgtaaatcttgcaaaagctaatgactacttgacatctttttttcctgacaacttttcttcctcaattttatctttcctcacaacagctgcagggaagtcaacatttgtgaatatccttaaacaattgtgtgaagattgggaagtggttcctgaacctgttgccagatggtgcaatgttcaaagtactcaagatgaatttgaggtatgaaaataaaatttaagtagataaaagcctcttggtttagaggagcagtagtacttaatctctttttctttttctttttcaataaaactttcaaatctcgctttaggtatatatcttcatctaggtggtggttacatggatatatatacagttggctctccatatcaatgggtttcagattgatatggattcaaccaatcatgaatagaaaatattcagaaagaaataatacaaaaaaatacaaataataaaggattactgttcatatagcatttacattgtattaagtattataagtaatctagagatgatttatactatttgggaggatatatgcagatactacaccattttacataaaggacttgagtatatgtggatgttggtatctgtgtggaacctggaatcaattcttgaggttactgaggggtgactatatgtttaaacatgcattgaggccggggttggtggctcacgcttgtaatcccagcactttgggaggctgaggcgggcggatcacttgaggtgaggagttcaagaccagcctcgttaacatggtgaaatgccgtctctactaaaaatacaaaacttagctgaacgtggtggtgggcacctgaattccacctgcttgtaaagccgaggtaggagaatttcttgaacccaggcagcggaggttgcagtgagctgagatggcgccactgtgctccagcctgggtgacagaatgagacactgtctcaacaaaaaaaaaaaaaggaaagtaaaatttatcaaactatgcattcaagatttatgcactttaagtaaagtataaaagttttctttttcataaaaatttctttttttgttgttatcctttaagttctgggatacatgtgcagaacgtgcaggtttgttatgtagatatacacatgccatggtggtttgctgcacccgtcaacccgtcatctacattaggtatttctcctaatgctaacccttcccttgcctcctaccccaccgacaggccctggtgtgtgatgttcccctccctgtgcccatgtgttctcattgttcaactcccacttacaagttagaacatgcggtgtttggtttcctgttcctgtgttagcttgctgagattgatggtttccagcttcatccatgtccctgcaaaggttatgaactcattcttttattatggctgcatagtattctttggtgtatatgtgccacattttgtttatccagtctatcattgatgggcatttgggttggttccaagtctttgctattgtgaatagcgctggagtaaacatacatatgcatgtgtctttatggtagaataatttataatcctttgggtatatacccagtaatgggatggctgggtcaaatggtatttctggttctagatccttgaggaatcgccacactatcttccacagtggttgaactaatttacactcccactaacagtgtaaaagcattcctatttctccacatcctctccagcatctgttgtttcctgactttttaatgatcaccattctaactggtgtgagatggtatctcattgtgggtttggtttgcatttctctaatgactggtgatgatgagctttttttcatgtttgttggctgcataaatgtcttcttttgaaaagtgtctgttcatatcatttgcccactttctgattgggttgtttgtttttttttcttgtaaatttgtttaagttccttgtagattttggatattagccctttgtctgatgggtagattgcaaaaattttctcccattttgtaggttgcctgtttacttggatgatagtttcttttactgtgcagaagctccttagtttaattagatcccatttgtcagttttggcttttgttaacactgcttttggtgttttagtcatgaagtctttgctcatgcctatgtcctgaatggtattgcctatgttttcttcagagtttttatgattttaggtcttatgtttaaatctttaatccatcttgaattaatttttgtataaggtgtaaggaaggggtccagtttccgttttctgcatatggctagccagttttcccagcaccatttattaaatagggaatcctttccccattgcttgtttttgtcaggtttgtcaaagatcagatggttgtagacgtgtggtattatttctgagggctctgttctgttccattggtctatagctctgttttggtacaataccatgccgttttggttactgtagccttgtagtatagtttgaagtcaggtagcatgaggcctcaagccttgttctttttgcttaggattgtcttggctatacgggctcttttttggttccatatgaaatttaaggtagttttttctaattctgtgaagaaagtcaatggtagcttgatgggaatagcattgaatctgtaaattactttgggcagtatggccattttcacaatattgatttttcctatctatgagcatggaatgttttaccatttgtttgtgtcctctcttctttccttgagcagtggtttgtagttctccttgaagaggtccttcacatccgttgtaagttgtattcctaggtattttattctctttgtagcaattgtgaatgggaattcactcatgatttggttctctgtctgttagtggtgtataggaatgcttgtgatttttgcccattgattttgtatcctgagactttactgaagttgcttgtcaccataagggattatgggctgagatgatggggttttctaaatatacagtcatcatctgcaaacagagataatttgacttcccctcttcctatctgaatcccctttatttctttctcttgcctgattgccctggccagaccttccaatactatgttgaataggagaggtgagagagggcatccttatcctgtgccgatttttgaagggaatggtatcggctgtgggtttgtcataaatagctcttattttgagatacatttcatcaatacctagtttattgagagtttttagcatgaagggatgttgaattttattgaaggccttttttgcatctattgagataatcatgcggtttttgtcattggttctgtttatgtgatagattatgttttattgatttgagtatgttgaaccagccctgcatcccagggatgaagccgacttgatcgtggtagatgagctttttaatgtgctactggattcggtttgccagtattttattgaggattttcgcatcgatgttcatcagggatattggcctgacattttcttttttttgttgtgtctctgccaggtttttgtattagggtgatgctggcctcaaaaaatgagttagggaggagtccctctttttctattgtttggaagtttcagaaggaatagtaccagttcctctttctacctgtggtagaattcagctgtgaatccatctggtcctgggcttttttttggttggtaggatattattgcctcaatttcagaactttttattggtctgttcattaaaccagagttcttcctggtttaatcttgggagggcgtatgtgtccaggagtttatccatttcttccagattttctagtttatttgcgtggaggtgtttatagtgttctctgatggtagtttgtatttctgtgggatcagtggtgatcctttattgtgtctatttgattcttcccgcttttcttctttattattctggctagtggtctatctattttgttaatcttttcgaagaaccagcttctggattcattgattttttgaagagtttttcgtgtctctatctccttcagttctgctctgatcttagttatttcttgtgttctgctagcttttgaatttgtttgctcttgcttctctagttcttttaattgtgatgttagggtgtcgattttagatctttcctgctttctcatgtgggcacttagtgctataaatttccctctaaacactactttagctgtgtcccagagattgtggtacgttatgtctttgttctcattggttgcaaagaacttatttatttctgccctaatttcgttatttacccggtagtcattcaggagttgttcagtttccatgtagttgtgcagttttgagtgagtttcttaatcctgagttctaatttgattgcactgtggtctgacagactgttatgatttccattcttttgcatttgctgaggaatgttttacttccaattatgtggtcaattttagagtaagtgcactgtggtactgagaataatgtatattctgttgatttggggtggagagttctctagatgtctttcaggtctgcttggtccagagctgagttcaagtcctgaatatccttgttaattttctgtcttgttgatctaatattgacagtggggtgttaaagtctcccactgttattatgtgggagtctaggtctctttgtgggtttctaagaacttgcattttgaatctgggtgctcctgtattgggtgcatatctatttaggatagttagctcttgttgttgcattgaaccctttaccattatgtaatgccctttgtctttttttcatgcttattgatttaaagtctgttttatctgagactaggattgcaacccctgccttttttttgctttccatttgcttggtaaatcttcctccatccctttattttgagcctttgtgtgtctttgcatgtgagatgcgactcctgaataccgcacactgatgggtcttaactctgtctaatttgccactctgtgtctttcaactggggcatttagcccatttacatttaaggttaatattgttatgtgtgaatttgatcctgttattatgatgctagctggttattttgcctgttagttgatgcagtttcttcatagtgtcgatggtctttacattttggtatgtttttgcagtggctggtaccggtttttcctttccatatttaatgcttccttcaggagctcttgtaaggcaggccttgtggtgataaaatccctctacatttgcctgtctgtaaaggattttatttctccttcacttatgaagcttagtttgactggttatgaaattctgggttgaaaattcttttctttaagaatgttgaatgttagtccccactctcttctggcttgtagggtttctgccgagagatctgctgttagtctgatgggcttccctttgtgggtaacccgacctttctctctggctgcgcttaacattttttccctcattttaaccttggtgaatctgacgattatgtgtcttggcgttgctcttctcaagggcatctttgtgatgttttctgtatttcctggatttgaatgttggcctgtcttgctaggttggggaagttctcctggataataatcctgaaatgtgttttccaacttggttccattcgtcagtttcaggtataccagtcaaacgtaggtttggtcttttcacatagtcccatatttcttgggaggctttgtttgttccttttcattctgttttctctaatcttatcttcacgctttatttttattaagtttttcttcaatctctgatatcctttcttccacttaatcgattcggctattgatacttgtgtatgcttcaccaagttctcatgctgtgtttttcagctccatcaggtcatttatgttcttctgtaaactggttattctagttagcagttcctgtaaccgtttatcaaggttcttagttccttgcattgggttagaacgtgctgctttagctcagtggagtttgttattaacccaccttctgaggcctacttctgtcaattcgtcacacttattctccatccagctttgttctcttgctggcgaggagttgtggtcctttggaggagaaaagacattctggtttttggaatttttagcttttttgcactggcttttcttcatctttgtggatttatctacctttggtctttgatgttggtgaacttcagatggggtttttgcgtggttgtcctttttgttgatgttgatgctattgctttttgtttgttagtttccttctaacagtcaggcccctctgctgcaagtctgctggagtttgctggaggtccactgcagatcctgtttgcctgggtatcaccagcggaggctgcagaacagcaaagattgctgcctgctccttcctcaggaagctttgtcccagaggggcacctgccagaggctagccagagctctcttatatgaggtgtctgccgacccctgctgggagctgtgtcctagtcaggaggcatgggggtcatggacccacttgaggatgctgcctgtcctttagcagagcttgagcgctgcgctgggagttccactgctctcttcagagccagcaggcaggattgtttaagtctgctgaggctgcactcacagccacgccttcccccagatgctctgtcccagggagatgggagtttgatctgtaagtccctgacgggggctgctgcctttctttcagagatgccctgcccagagaggaggaatctagagaggcagtctagcttcaggggtttgccaagctgtggtgggctctgcccagcttgaacttccaggtggttttgtttacactgtgaggggaaaaccacctactgaagtctcagtaatggcgggcacccctccccccaccaagcttcagtgtctcaggttgacttcagactgctgtgctggcagtgagaatttcaagccagtggatcttagcttgctgggctccgtgggggtgggatctgctgagcaagaccacttggctccctggcttcagcccccttggctccctggcttcagccccctttctaggggagtgaacggttctgtctcgctggcattccaggcaccactggggtatgaaaaaaaactcctgcagctaactccgtgtctgcccaaatggctgtccagttttgtgcttgaaacccagggcccttgtgtaggcacccgagggaatctcctggtctgcgggttgtgaagactgtgggaaaaagcctagtatctgggctggatagcaccatccctcaaggcttcccttggctaggggagggagttcccccacccctttcaccttccaggtgaggcgatgccccaccctgcttctgcttggcctctgtgggctgcacccactgtataaccagtcccaatgagatgaattgggtacttcagtcggaaatgcagaaatcacccgtcttctgcattggtctcactgggagctgcagaccagagctgttcctatttggccatcttgcctgggaatctaaaagtttttaaaaagttaaataataaaagttttaaaaaatctaacagcaaattaaattccttcattgtcttttctaatttttttttttttttgagatggagtttcgcttttgttgcccaggctggagtgcaatggctcgatcttggctcaccacaacctccgcctcccgggttcaagcgattctcctgcctcagcctcccaagtagctgggattacaagcatgggccaccatgcctggctaattttttttactagagatggggtttctccatgttggtcaggctgggcccaaactcctgacctcaggtgatccgcctgcctcagcctcccaaaatgtttggattacaggcctgagccactatgcccaacccttcagtgtcttttcacattttgtttaaaaacaagcaaataaggccgggtgcggtggctcacacctgtaatcccagccctttgggaggccgaggcaggtggatcgcctgaggtcaggagttcgagaccagcctggccaacatggtgaaaccctgtctccactaaacatacaaaaattagctgggcgtggtggtgggcgcctgtaatcccagctactcaggaggctgaggcgggagaattgcttgaacccgggaggtggaggttgcagtgagccgagatcgcgccattgcactccatctcaaaaaaaaaaaaaacagaaaaaacaaaaacaccaaaaaaaaaaaaaaaaaagcaaataagaaaaagaaaaactactattcagtaactgaattttacctttcaagccttttgtcatttactctcatttctttttactttcattcttgccagactttcactctgggcagaagttgtaattttgcagcattttaccgttctgcactgcaaatgaggaagaaagagaatgacagagttcagtgtcatttttttaaataccaaaatgtatggttgtatgtgtgagagagacgttgctaagattttcgtttctggagaaatgagaattgaaattgaaagcaaggccaggtgtggtggtttatgcatgtaatcctggaatttttttttttttaagtgacagcaagtttattaggaaagtaaagcaataaagaatggctactccataggcagagcagccaatcccagcacttcgggaggctgaggccagaggatcgcttgagcccaggagttcaagaccagcctgggcaacatagggtgaccccgtctctacaaaaaatttaaaaattagctaggtgtggtagcctgcacttggggttacagctacttggaaggctgaggttggaggactgcttgagcccaagaaattgagactgtagtgagccatgctcatgccactgtactctagcctgagtgacagcaagaccctgtctaaaagaaaaaaagaaattgaaagcagtaaggcagaaaccttaaaaatggaaatgtatgctaacaacttactttgatctgaggagtacagaaaattgaaaaaaaagtatctaaaaaaatttagctgttggtataaggaattctgggaataataattgaatatttaaaatgtaaatcacatatgcaaagaggaatcactagcaagatattccatggactttgagaatatatggttttgaataaccaaaaatactttttcatacaccttctatttgccaggcatagctaactttagacctagggcctaattcagtacaccccaatccttaggatatccaggactaaatcttaaaggggctttcttcccatatagacctcattatcttaagaaattgatgttttatatctgatttttggggaaaggcaaggttagtctacagtagaattttaaagtgggtaaatttgtttatttgattctttttaaaaacatttttgacatgatatatctgtagaaaagtaggtaaaagctaatgtacagtttgaagaacagttttaaagttgacatctttataaccattatccaggtcaagaaatacgacatcatcattccagaaatccctgttcgccttctccaatcactatatcttctttcctacgttactactccgctaggggtaattactcccattcttttgtgataataattttcctgcttcctaaaaattgtttgagcatacatgaacatacctctaagtataatttagttttgtctatttttgaatgttatataagtggaattacattgtttgccttttttcctctcgcttcttttacttaatacatttatgaaatttgtccatattatatgcagctgtagcttattttcagctatatagtattgaattttgttttttaaaaatattcttttttttgagacaggatttcactctgttgcccaggtaaagtgcagtggcgcagccatggttcactgcagcctcaacctcccttggctcaggtgatcctctctcctcagcctcctgagtatctaggaccataggccaccacgcctgtgtgccaccaggcttggctaatttttgtattttttatagagacggggttttgccatgttacccaggctggtttcaaactcctgggctcaagcgatctgcccatctcagcctcccagagtgttgggattacaggcttgagccactatgtggggcctatagtatttaattttattcgtctatcactgtttgtccattttatacctttaattgatttttgagtgatttccaatttagttgcttatgtaaacagcattgctgtgaacataaattcacccgcatacatgcaaaagtttctgtaggaataagaagtaaaattactgggaatgcttatgatgcctgttttccaaactggctttccaattttctctccccccagtgtaatcaagctctcattaatctatgtctttgccagcatttagtagtgtctggctttctcatttttgtcattctgctgagtgtttactatttttttgtttaatttgtatttccccgctggctaatgaggctgtgttccttttcatatgtttattagtcattttgatttttgcaaagtgcccacttgggtccttttgcccattttcctctgagccatctgtcttctctcactgcatttttaatgtagcttttcgctgaagtacctactcaagtttgcttagcttttgaaggagagactggagttctaaaagcaactctttttccttttatttctggggtcagctgtcagtgcagttatcctcaggtagtagacagaaactaaccagattaaaccaatgttggaaaatagagggtattcttaaacagggtattggactaggtgacctccatttaaggtccgttgacatatttgtcatttgactctcagcatgcctcacattaaccaagggcacagaaactgacatataaaaccaaaatgccaaaaattttaatttgcagaaagaaatgtaatcattaaggtaattgaatttagatcagtttattctttatttggttcgtaattctcaaccagtggaaggaagtcataagaatgtctgagagctaaacagtttgaacacatggagatagagtgtggaaaaatagataacaataactgggaagggtaggaggaggggaagatgaagaggagtgagttaaagtgtacagatatacaggaagcttgaagaaataattcagtgttttatagcaaggtagaatggaaaaatacattgtactcaggtgatggacaccctgaatgattcgattactgcatattatatacatgtacaaaatttctcatgtattccataatttgtacacacaagaaagaatctcaaggattcgggtgctttttaaaataacaatcccttggaggttcaaatatgtgggatgcctcatagttaaaagtcatcaccctagtgaatcactgttaactgttgggagtatactgaactctttagttaggttgcagagaagttgaaaaacattgctttcgtatataagacaagacaatttataataaggttgtctgttgagcttggaatcagagcccagagggattagttaaatcatgttaatcagactgtgtcatcagactgtgatgcattaatacatttgtcttcattttaagacttaatggctttctgaatctgatatccatgtttatgggatgggacattttctttccatatacttgattcagaatgccaaactggccattctttataactagcatgcaggtgatcctattattattaacatattcttttatcaggccgtttattgtaatctggtcatgtcttcatgatgttacaatttgattacctttgttagagtttggtgcacattcttggaaggtagcttcagcttttttgtgtgtattggggactgctccgttgttaattctctgtacttctgtacagagggggtagtatttttgagatatagttgtggaatatgaggatggttgggtgggtggcttccctgtatctttggatattttcttccactaaactcaagaagtgagattttatttcttcatccagtagtccttcttccccagactcatccttgatctattccttgaggttatagtatgaatcacccactattcaaatgtcaatttttcttagaatgctgttagtgatgagaagtgactgttttcagacctaaccttggcaaggtcagtcctactttgatgttcttgtttcatcacacttcttggcatttgtagatttggaagaattgggcctttggtacctctgatctcttcgtttagcaacttactgtgcacccatatgcttagcttttgctgttttagctttttttttttttttttaacctgccacctagtggccgaaatgttgctatactattgataaggtactcctaattttggcaaaatagtaagaggcaaagcaccaaagattatgttctctcccttctccaaatctctcttggtgagaatgatctttaaaacataccactcagattattagcaatcttggtatggaacgtttttaaaaataataataatgtactttatgtggtgatttatgttattatttaggcccaaagttttgatttaattgtttccttttagcttatttttgagatatgcagtctgttaggaagctgtctctgtcttgttttttcattgagctgaattcttttggaggatcactattattgtgaagtactattttacttttaattaaaaaaattaagatatttttatttttaatttacagataaaaattatatttaattttatattatatttatatataaatcatatgtaatgtaaattatatacataagttatatataatataaaaattatatacataatataaattatatataatataaaaattatatttatggtatgcaacatgatgttttaaaatatgtctacattgtggaatggttaaaccaagctaattaacatacgcattacccgtactattttacttttatccaatacttcttaccactaataagccactgaaaaactagtaattgtgataaagaaggtgtaaaccatacttatttatgacagaacagcatattttttacttttaataagtcattctttttttttttttttgagacggagtctcgttctgtcgctcaggctgaagtgcagtggtgtgatgttggctcactgcaacctctgcctcccaggttcaagcgattttcctgccttagccttccaagtagctggagctgggattacaggcatgtgccaccacgcctggctaatttttgtaattttagtagagatggggtttcaccatgttggccaggctggtcttgaactcctgacctcaagtgatccacccatctcagcctcccaaagggctgggattacaggtgtgaggtctcttttttttttttttttttttttttaagacggagtcttgctctgtcccttagtaagtcattcttgaaaattagttaagaatgcttgataaagcacttccacttgtaccttttgaatagatgtgataacttttgttggcttgtatttttttgagtcttgctttattgcccaggctggagtgcaatggtgaacctcagcccactgcagcctccgcctcctgggctcaagtgatcctcccacctcagcctcctcagtagctgggactacaggcccacaccaacatgcccggctaatttttgtattttttatagcgataggattttgccaatgttgtctggatttgtctcaaactcctgggatcaagcaatccgcctgcctcggcctcccaaagtgctagaattaggcatatgagtcaccatgcctggcctgttggctattttataattatcttgtttggtagactctgatcttttacagttgaacttaattcaactcttttgcaatgtttacaaagattagacctagaattaaaagataaatgattttatagctgaccttgatatttctatttttcacttaccttgacaataatctgtacttcctataacaatgaagtattctttcataaagtgaaaatggacatatattatagagaacagaataaatgttattcataatcctaccactctgtatgtatcttttacatagttgaattaataatgtaatatattaaattttggtggaggtgatatgtaatttaaaaaatattataaagtaatacctgtttactgtttgaagttaaggaaatattagaaattatcaaaagaggggactaaaacttacctataaccttattatccagagataaccatagatcttacttgaaagaacagtatacagttttgtattttgtttcttccccaccccccacaatatttatatgtcaagagtctgagatccaactgcaaggcggcagtgaggctgggggaggggcgcccaccattgctgaggcttgggtaggtaaacaaagtgggctggaagctggaactgggtggagcccaccgctgctcaaggaggcctgcctgcctctgtagactccacctctgggggcagggcatagctgaacaaaaggcagtagaaacctctacggacttaaatgtccctgtctgacagctttgaagagagtagtggttctctcagcacggagtttgagatctgagaacggacagactgcctctgcaagtgggtccctgacccccgaatagcctaactgagaggcaccccccagtagggggagactgacacctcatacggctgggtacccctctgagacgaagcttccagaggaacgatcaggcagcaacaattgctgttcagcagtattcgctgttctgcagcctccgctgctgatacccaggcaaacagggtctggagtggacctccagcaaactccaacagaccagcagctgagggtcctggctgttagaaggaaaactaacaaacagaaaggacatccacaccaaaaccccatctgtacgtcaccatcatcaaagaccaaaggtagataaaaccacaaagatagggaaaaacagagcagaaaagctgaaaattctaaaaatcagagcgcctctcacctccaaaggaacacagctcctcgccagcaacggaacaaagctggacggagaatgactttgacgaattgagagaagaaggcttcagataatcaaacttctccgagctaaaggaggaagttcgaacccatggcaaagaagctaaaaaccttgaaaaaagacgaatggctaactagaataaccagtgtagagaagtccttaagtgacctgatggagctgaaaaccatggcacgagaactacatgacgaatgcacaagcttcagtagccgattcaatcaactggaagaaagggtatcagtgattgaagatcaaatgaatgaaatgaagtgagaagagaagtttagagaaaaaagagtaaaaagaaatgaacaaaacctccaagaaatatgggactatgtgaaaagaccaaatctgcgtctgattggtgtacctgaaagtgatggggagaatggaaccaagttggaaaacacacttcaggatattatccaggagaacttccccaatctagcaaggcaggccaacattcaaattcaggaaatacagagaacaccacaaagatactcctcgagaagagcaactccaagacacataattgtcagattcaccaaagttgaaatgaagggaaaaatgttaatggcagccagagagaaaggtcgggttacccacaaagggaagcccatcagactaacagtggatctcgcggcagaaacgctacaagccaggagagagtgggggccaatattcaacattcttaaagaaacgaatttgcaacccagaatatcatatccagccaaactaaacttcataagtgaaggagaaataaaatcctttacagacaagcaaatgctgagagattttatcaccaccaggcctgccctacaagagctccggaaggaagcactaaacatagaaaggaacaagcggtaccagccactgcaaaaacatgccaaattgtaaagaccatcgaggctaggaggaaactgcatcaactaatgagcaaaataaccagctaacatcataatgacaggatcaaattcacacataacaatattaaccttaaatgtaaatgggctaaatactccaattgaaagacacagactggaaaattggataattggataaagactcaagacccatcagtgtgctgtattcaggagacccatctcatgtgcagagacatacataggctcaaaataaagggatgtatgaagatctaccaagcaaatggaaaacaaaaaaaaggcaggtgttgtaatcctagtctctgataaaacagtctttaaaccaacaaagatcaaaagagacaaagaaggccattacataatggtaaagggatcaatacaacaacaagagctaactatcctaaatatatatgcacccaatacaggagcacccagattcataaagcaagtccttagagacctacaaagagacttagactcccacacaataataatgggagactttaacaccccactgtcgacattagacagatgaacgagacagaaagttaacaaggatatccaggaattgagctcagctctgtaccaagcggacctaaaagacatctacagaactctccaccccaaatcaacagaatatacattcttctcagcaccacatcgcacttattccaaaattgaccacatagttggaagtaaagcactcttcagaaaatgtaaaagaacagaaattataaaaaactgtctctcagaccacagtgcaatcgaacctagaactcaggattaagaaacttactcaaaaccgctcaactacatggaagctgaataacctgctcctgaatgactactgggtacataacgaaatgaaggcagaaataaagatgttctttgaaaccaatgagaacaaagacacaacataccagaatctctgggacacatttaaagcagtgtgtagagggaaatttatagcactaaatgcccacaagataaagcaggagagatctaaaattgacaccctaacatcacaattaaaagaactagagaagcaagagtaaacacattccaaagctagcagaaggcaagaaataactaagatcagagcagaacggaaggaaatagagacacaaaaaacccttcaaaaaatcaatgaatccaggagctggttttttgaaaagatcaacaaaattgatagaccgctagcaagactaataaagaagaaaacagagaagaatcaaatagactcaataaaaaatgacaaagggagtatcaccactgatcccacagaaatacaaactaccatcacagaatactataaacacctctacaaacacctctacgcaaataaactagaaaatctagaagaaatggataaattcctggacacatacactgtcacaagactaaaccaggaagaagttgaatccctgattaaacccataacaagctctggaattgaggcaatagttaagagcctgccatccaaaaaaagtccaggaccagatggattcacagccgaattctaccagcagtacaaggaggagctggtaccattccttctgaaactattccaatcaatagaaaaagagggaatcctccctaactcattttatgaggccagtatcattctgataccaaagcctggcagagacacaacaaaaaaagagaattttagaccaatatccctgatgaacatcgatgcaaaaatcctcagtagaatactggcaaactgaatccagcagcacatcaaaaagcttatccaccatgatcaattgtgcttcatccctgggatgcaaggctggttcagcatacgcaaatcaataaacataatccagcatataaacagaaccaaagacaaaaaccacatgattatctcaatagatgcagaaaaggcctttgacaaaactcaacaacccttatgctaaaaactctcaataaattaggtattggtgggatgtatctcaaaataataggagctatttatgacaaacccacagccaatatcacactgaatgggcaaaaactggaaacattccctttgaaaactggcacaagacacggatgccctctctcaccactcctattcaacatagtgttggaagttctggccagggtaatcaggtagtagaaggaaataaagggtattcaattaggaaaagaggaagtcaaattgtccctgtttgcagatgacatgattgtatatttagaaaaccccatcgtctcagcccaaaatctccttaagctgataagcaacttcagcaaagtttcaggatacaaagtcaatgtgcaaaaatcacaagcattcttatacaccaataacagacaaacagagagccaaatcatgagtgaactcccattcacagttgcttcaaagagaataaaatacctaggaatccaacttacaagggatgtgaaggacctcttcaaggagaactacaaaccactgctcaatgaaacaaaagaggacacaaacaaatggaagaacatttcatgctcgtggataggaagaatcaatatcgtgaaaatggccatactgcccaaggtaatttatagattcaatgccatccccatcaagctaccaatgactttcttcacagaattggaaaaaactactttaaagttcataaggaaccaaaaaagagcccgcattgccaggtaaatcctaagccaaaagaacaaagctggaggcatcacgctacctgacttcaaactatactacaaggctacagtaaccaaaacagcatggtactggtaccaaaacagagatatagaccaatggaacagaccagagccctcagaaataataccacacatctacaaccatctgatctttgacaaacctgagaaaaacaagaaatggggaaaggattccctatttaataaacggtgctggaaaaatggctagccatatgtagaaagctgaaactggatcccttccttacaccttatacaaaaattaattcaagatggattaaagacttaaatgttagacctaaaaccataaaaaccctagaagaaaacctaggcaatactatttgggacataggcatgggcaaggacttcatgtctaaaacaccaaaagcaatggcaacaaaagccaacattgacaaatgggatctaattaaactcaagagcttctgcacagcaaaagaaactaccatcagagtgaacaggcaacctacagaatgggagaaaatttttgcaatctactcatctgacaaagggctaatatctagaatctacaatgaactcaaacaaatttacaagaaaaaaacaaccccatcaaaaagtgggcaaaggatatgaacagacacttttcaaaagaagacatttatgcagccaacagacacatgaaaaaatgctcatcatcactggccatcagagaaatgcaaatcaaaaccacaatgagataccctctcacaccagttagaatggtgatcattaaaaagtcaggagacaacaggtgctgcagaggatgtggagaaatgggaacacttttccactgttggtgggactgtaaactagttcaaccatgtgtaagacagtgtggtgattcctcaaggatctagaactagaaataccatttgacccagccatcccattagtgggtatatacccaaaggattataaatcatgctgctatacagacacatgcacacatatgtttattgcggcactgttcacaatagcaaagacttggaaccaacccagatgtccatcagtaatagactggattaagaaaatgtggcacatatacaccatggaatactatgcagccataaaaaaggatgagttaatgtcctttgtagggacatagatgaagctggaaaccatcattctcagcaaactgtcgcagggaaaaaaaacaaaacactgcatgttctcactcataggtgggaattgaacaatgagaactcttggacacaggaatgtgaacatcacacactggggcctgttgtggggtggggggaggggggagggatagcattaggagaaatacctaatgtaaatggcgagttaatgggtgcagtacaccaacatggcacatgtatacatatgtaacaaacctgcacgttgtgcacatgtacccaagaacttaaagtataaaaaaaaaatttatatatcagggcaattaaaatcgttgttaaaaatttactgtaaatgatttttaacagcagcctaatttattgtatgcatgtactattatttacttaatataaatgcctaataatagtggaatgataacctattcgcttagccttgtgataaatacctttgtggttaaatttgtattctagattatttcttttttttttttttttttgagacggagtctcgctctgtctcccaggctggagtgcagtggcgccatctcaacttgctgcaagctccgcctcccaggttcacatcattcttgtgcctcagcctcccgagtagctgagactacaggcgcctgccaccatgccccgctattttttttggtatttttagtagagacagggtttcaccgtgttagccaggatggtctcgatctcctgaccttgtgatccacccgccttggcctcccaaagtgctaggatcacaggcgtgagccactgcgcccggcctagattatttctttaaagtaaattttcaacagtggaattaattgggccaaaaggtacaggttttttttttcccacaaatgtagctaaactgctttctatctaaccatgttctaccaatttgtatttaatgtagtttcactctgacacattcatattttttatctggatagtttgcagaggggagaacttgataaaattaacattcagtttggtaaagatgatgcacagtattttttagattttttttttttttttttttttgagacaagagtcttgctctgttacccaggctggagtgcagtggcacaatcttggctcactgcagcctccacctcccaggcataagcaattctcccacctcaacctccggagtagctgggattacaggtgcacgccaccatacctggctaatttttgtattttttgtagagacagggtttcgccatgttgcccaggctggtctggaactcctgagcttaagtgatccgcctgcctcggactcccaaagtgctgggattacaggcctgagctgcctcacctggctggataaatttttaatattcttaacatttataattgcatacaaaaaaccctagcaatttgtctcaaatttcatgcataggatcaaaagaaaatgttttatatgactcataagttatcctgaggaaccagataatgataccctggcttactgttaattttctaatttgttacactattaaactaagagacaataacatcttcatagctgaaaattctatttcagatttttgattcagtttgaatttacatatttgtatttttagaactagtttattatttttttgttaggtgatgaatcaagattggttctctaagttattttaatatagtaaactttgaaattgctttgggcaagagagattatatttattgagaaattaaaataaaaggaggtatgtggtcttttttagttaatttttttgttgtggcaaaaatataaaatttatcatctgaaccatttttaagtatacagctcagtagtattataagcatatttaggtcattatgaacagatctccagaactttagcctcctgaaaagatccagagacccctggagcttctcctactatactttgaagaacctctatcttagagaatatattacttcatctggaaaagacagactcacagagaactctagaaatatagtcttttaaaacatatcatctaaaagattaataattctttttatcatcttatccggtctgtgttcatatttccccattgtctaataatgttttcgtaattttttgaaattaggagccaaaccaggttcacacacgttacatttggtggttgatataccttttatttttttttaaatttatttttctgagatgaagtcttgctctgtcacccaggctgaagtacagtgcatgatctcagctcacggcaacttctgcctccccagttcaagtgattctcctgtctcagcctcccgagtagctaggattacaggcgcgtgccaccacgcctggctaattttttatatttttggtagagacagggtttcaccatgttggccaagctggtcttgaactcctgatctcaggtgatctgcctgcctcggcctcccaaagtgttgggattacaggcgtgaaccactgggcctgcccttgatatgccttttaaattttaatctattgattgtctctttgtttataatttatttgttgaagaaacagggtcatttgttctacataattttcctcattctggttttggctgagtgtatctctggtaaaatttaacatgtttttcagttctctgtatttccagtaaatttataggtagagacaggcttgattagatttactttcaattcttttttggcaagattcctagttggtgatgtgtatttctttacatcaagaagatgtgttttgtgatgttaaaatcaaacagtttagctgttgtcagattgattcatccgttgtaaaattcccaattaacttttctctaatgatagcatctattgctaattgttgcctcattgcagtatattagtaggtgttgtaaaaggtgatattccttctccagccttctgaatttattggctgggattcttcaggaaagaagacctcttcctcatataccactttattaccctgaaagtatttatacaggaaaggccaaaataaaatgggactttttttttctttttacctacatattcccagaataattaatttgtgccttaggagcctcaaaacatgactagagttttgtttgtttgtttagaattataaactcatggatttttgcctcccattcattttcgatgttcaaattattctttctttgaccagtggcagcttatttatgttggctcctttgtccttggcacaatcccagtggtctgtagtagtttcctaaaatatacaagatgaagctcatcttgtatattttcttccccagatttagaatcagaattctaattcctttcagtgggaaatggtatttagagattataatctgggtgatatttttgtatattcctacaatgttgtcattgtttataggccttttgatggacagaactaggaaaactttatagaaagagaaaaataattcatgtgttccagatgctatttcttttttttttttttttttttgagacggagtctcgctctgtcgcccaggctggactgcggactgcagtggcgcaatctcggctcactgcaagctccgcttcccgggttcacgccattctcctgcctcagcctccccagtagctgggactacaggcgcccgccaccgcgcccggctaattttttgtatttttagtagagacggggtttcaccttgttagccaggatggtctcgatctcctgacctcatgatccacccgcctcggcctcccaaagtgctgggattacaggcgtgagccaccgcgcccggcctgctatttctaactcagataaaagatgataagagtttttacttcattttaaaatttacatttgtatttttcctcaacatgtaaaatgtggttctaacaataagattattgaattgcaaaatctggggcaggaactattgtattatattagaagattggagggttacaaatacaaatgcctaaaggggccagacagccaaatgaatatatcaggcctgttatgaaaatcatccgggaatggtggggattaataagccagagagcatatatcccatctaaaggaggcatctgtgacttgattctagctgatttttgccaagagggaatatgggcatggtactgcttggttttttcatttttaaaaagaagacgtaatccctgcactttgggaggccaaggcaggcagatcatgaggtcaggagatggagaccatcctggctaacacggtgaaaccccgtctctactaaaaatgtaaaaaattagttgggcatggtggcacgcgcctgtagtcccagctacttgggaggctgaggcgggagaattgcttgaacctggtaggtggaggttgcagtgagctgaaatcgtgccactgcactccagctggggcaacagagcaagactccatctcaaaaaagaaaaaaaagaagatgtaaatccaaatattttatgtgaaattatttagcttttaaatattgacaatactattgacaaactaagtcaaagttttaaaaaggacttttggaccaaacaatgatttcttccataggttattagtttgtaacctcttgtgagaaagatctaaggattttccagacctcagacaatctgaaaaatatattgggaaagagtatgagaaagggaacttaatcatcttggttttgctgatcatgattacatttatttatctgacttttattttttagccttaaaaattaaaatagccctattgaccattaattttgctttttatttctttttgcacattcaaaataggaacttacaatgtctcagaaaaatggtgggaatgttcttcagatgatgtatgagaaacctgaacgatggtcttttaccttccaaacatatgcctgtctcagtcgaataagagctcagcttgcctctctgaatggcaagctcaaagatgcagagaaacctgtattattttttgaacgatctgtgtatagtgacaggtatgtataaatggcttgtacgtggccatttgaagtttttatcttagaactggactttttttttttttttaatgtttcctgggaattagtaataatgaatggctgagctggggatttaagatggaaaatgacatttaaatccctcagcagtctggtactaatggcattagggaagttattgcatttataatcctcagcttccatagaaactgttgggaatatggtggtgcccatttcatttaaatttgcagagaagttgtttttccctctaacccttttaaaattctcatctgctctggttaaatctggatctatatcctagactcttacctggatcaagaagataaaagtctctaaggggccttagaattgccctacttatgctaggattcttttgacctccaaagttagctcagaacagaggttctcaaacatttgatctcagggcccttttcaattcttaataactatcgaggtgtccaaagagcatgtcctattgatacttaacattactagaaattaagatgcacaaaaatgatttaaaattagcaataataaattcattacatattaatataaatacatttgacaaaaagttatattttctaaaataaaaagtagctagaagaatatcattgctttacatttttgcagatatctttaatgcctcacttattaaaagacagctggatttttatttatgcttctgtatttaatctgttatggtatgtttgtttgtttgaagtatattggtatatgaagtaatctggcctctcacagaaccccttagaagatcttggggacttaatggggtcctcactccgtattttgagaaccattggccaaaaacatgatggaaagactcttgtctttttctgctttccacggcactatgtgccactggatttaggagaatgtttcatgttcctgttctcttttttatttctttgttgtttttttttgaaatgatacatgtgttgatgaagactctcttttaggtatatttttgcatctaatttgtatgaatctgaatgcatgaatgagacagagtggacaatttatcaagactggcatgactggatgaataaccaatttggccaaagccttgaattggatggaatcatttatcttcaagccactccagaggtaaaacccaataaaaatgtgtttcactgaaaatttaaagaaatatttagaactcttttcagtggtatataatgagggcaatttagtttaactccagcctcccaacctcccactccccacctctaaattagaaacttgtaactgtgtagatagaagcattcttttttctcagcaaactggaatcccagactgggcaagttgctgttttaggctctttgtgcttcctcaattcttttttattttactcattatttctttctaacatttgcagactcttctcattcatcacagttaaagtaatgaatgtggtcaagcaactcctagaatataggcttcatgaggtgggaccttgggcattttgattactattgaatttccattgcctagaacacccagtgctgggcactgttggagcatatagtaggagctcagtaaatatttactgaatgaatggcaatgttgatggaggtccatatcaagaaatattttattatggttgtttgtgccttggaatgagtggataatggcagctatcgttgggaaaagacttagaggacccttgccattttccattaagggagctcacttgaaaaggtgctttttgtgataggttgtaacatagctattctagttacatatgatgttatataatgaatacaggatgaccaaatagatgcctttcataaaactaacctaaatattaagatcttacatttaatcagaagctttctggttttggtgcgtgcatttctattgtttctgttttttaattctcattttttccttaagtcacagggtaggcactgatgaatgtaaatgttatgacttctggcctaaaattagaatactgtgttgctgtcgaagctgggttttcaaagaaattaggtttcctattccaa

SEQ ID NO: 583 - protein, 119 aa, Homo sapiens [sequence omitted]

SEQ ID NO: 584 - DNA, 360 bp, Homo sapiens
  source 1..360: mol_type = genomic DNA
atggccaaggagaggggcctaataagccccagtgattttgcccagctgcaaaaatacatggaatactccaccaaaaaggtcagtgatgtcctaaagctcttcgaggatggcgagatggctaaatatgtccaaggagatgccattgggtacgagggattccagcaattcctggaaatctatctcgaagtggataatgttcccagacacctaagcctggcactgtttcaatcctttgagactggtcactgcttaaatgagacaaatgtgacaaaaggtatggtcaagcagatgtggtgtgtctcaatgatgtttcctgctacttttcccttctggagggtggtcggccagaagacaagttag

SEQ ID NO: 585 - DNA, 27909 bp, Homo sapiens
  source 1..27909: mol_type = genomic DNA
aagaaggagggcaggaactggagggaaatgagagtgtagaagcccccaagcctgaagaacctaaaagagatatgagtggtccaactgctggagaaaagctaagggcccgtgagggtcctgaagcagggaccagcactgaaggaccccagggtttgggtgaccggaagcagagaccccaaacacgagaccagaagggggcgcaggagacaccccgtaggagagaatgaatggggaaggcggtccggggggcggggcaaaggaggggccccgggatgggcggggcacagacccctttccaagtccgaacccctgccccgagagcccggagagaagcggctccgcgcctcccgcactcaccgccggtctcgtcagtaacatagggagtcgccatcttgaaaacgcaaaccacttccggcgtgagcgggctggggtcccgcccccctccccaccggaagtggagtcccgatcgtagcaagccaccatcttagtcttaaagggagagtgcaccatttcatgggcggaggtggaggaggaggaagagtggagaagctgaaatagttaataaaataaagccgtgggctttttactgccaccgataccattactgagcgcttgctgcctgtaaaacagtcctcagggagccaagagaagttccgaggcacagtccctctcatccccaggaactcctcgtacgtccaggacctgcgagggaaaagggcgcaaggcccacctgcacccaaaaagggggccttataaatgaagaaaggaagaatatccaggctctggcctgcacccagatctcagagcggcttggtgacgtggagcagacaaactccaggaacgcactggggcgcacaagtgtttctagggacggttggagaccctatctaaccctaagaaggtggggaggtcgaattcgtgtgccgattgctgtcggccaacccactcaaccaccagagacccgcgggaggggcgtgcaaggcggagggcgccgcgggtcggtcacctgtctccgtagccgcagggctgccggcagcttccatggccgaagaggcagcggaccaggttgggcgggcggccctggcctggctctgccccgctgggcggcgccggggattcggcggcgaagtgatgagggccctagttgcttctcgcccagacctcctaaccctgagtgcctcctcgggctgggccctagggtcagagggcagggtgaaagcttctgggcggacctacttagtattctaattaaactcgtccaaccgctgaggatctaaagcggggcaactcgccaataatccggtcccgtagtgtcactccatttgtagtcctgccctgcgccgtacctccctattctgcagacgaacccatatggtctccctccgccgcccatttcagcaactgttgttccttcagggctaagtcctgttaaacttgtttcccctacagcctgagaggagcccggctgcaggttcctctcctcaggtgtcaactctgccctcctccaccctcatatagctttttccttatcaacccttttaccttcctgcttatatccccactttggcttagtttaatgtccagcagtacccctggaaccagggaggaggcaggaggtaagtattggtgactacctccaacactaggcagcatgtcccatttaaaaaacaaaacaaaacccaggcgcggttgctcacgcctgtaatcccagcactttgggaggccaaggcgggtggatcacgaggtccggagttcaagaccaacctggccaagatggcgaaaccccgtctctactaaaaatacaaaaaaattagccgggcgtggtggcgggtgcctgtaatctcagctactcgggaggctgaggcagagaatttcttgaatctgggaggcggaggttgcagtgagccaagatcgctccactgcactccagcttggacgacagagtgggaccccgtctcaaaaaaaaaaaaaaaaaaaaaaaaaaaaaactaaaaaactgagcaatggctgactaggacctttataagacaaattaggcctcagaagttttctgggggccgcagcttgccttccttcccatcctccatgtctgtgacttccactagaggccaattcagaatgtctgggggtggggctcatttaaaaagtatttccaggccgggtgcggtgtctcatgcctgtaatcccagcactttgggaggcccaggtgggcagatcacttgaggtcaggagttcgagaccagccatggccaacatggtgaaatcccatctctactaaaaatacaaaaattagccgggtgtggtggcgagtgcctgtaatcccagctactcgggaggctgaggaatgaacctgggaggtggaggttgcagtgagccaagatcgtgccactgcactccagcttgtattatagagcaagactcagtctcaaaataaataaataaaaagtatttgcatacgatacactgttattgcaagtgttgtgacactgtggtcttaaacccttgctctcttttcaccgattgtacttcagccctgcagggtctaacatcttgtccttaaccttgttatgattagacgtgagagtgtgggatgaagcctctaagaactaatgggatacgttggtcttgactgaactacctcaggagtggtctctgcagctttcagaggctgctcaatagacctttgtgcaggagggaaacctaaagtcgcccctgttcactaccaaccctaggcccccttcccacccccagacatcctgcctcagcactagggttgacaggaagtgaaactcaattgtctgcttagtagacctgcctgggacccaacccggggccccggatgtggccccccaccctgaggaggaacagggcaaaaaaggccggggagaacaggctgttgttttttcctttccctttgttcattgcggtttctttctttctgatttttatgatgtggttgattaaagaaatgagcacctggaaccgtaggcattaaacgcctccttcttagatgtttcttggcttttcttcccccacccacaccccccagtaactgacttggggtatgatggagcacagatcctaaagaagacacaaagaagtctagagtaagactgattccaccttattccttattcgagagataacattacaccccactttgaagtaccaaaaactatcttaaaaggagtgtcttcaactttatttagggacatatctaaagacgatagagtgagaaacacaggtaatacatagggtggcattactttgagcattctttgcaaggaaagctgagtgccttagagattaatatcgttccaagatttctaaatgaaagatccagggacagaaaactgataggcagaggtgttaggggacctattcttacattgtatgtttgtttaaagtagctcagagcagagaggctttacacacattgcaccactcattgatatagtccctaaactggactatgtttttgcttgtattgcagaactaagtacaggacttagtgtataaaaggccttcagaagagtttgtttactatgactaaggaggtcatagaggaaggagagatgaagctttgctaacagtgaagaaaatactgtaaagacaggatggggagtgtcaagggccttgtttttttttttttttttttttttttttagacagagttttgctcgtgtcacccaggctggagtgcagtggcatgatctcggctcactgcaacctctgcctcccaggttcaagcgattctcctgcctcagcctcgcgagtaactgggactacaggcatgtgccaccacgcccggctaattttttgtatttttagtagagacaggttttcaccgtgttagccaggatggtctcaatctcctgatctcgtgatccgcctgcctcagcctgccaaagtgctgggattacaggtgtgagccaccgcgcccggcctttggcccttgtctttttatgattgggggtgagagggtgagacttggaggggcacaggagcagagagacagacccctcttcaacctatgcccgaaatctccagtttggatacaacaatactcccaaaccctattactcagcagctatatttctggcaaatgtggaggagtctgttccaacaagcctgtcttgaaacaatcaagaactgcttagatatccctgtttccactagagggcctcatgtattcattccctttccaacccccaccaaaagtatgtatatattatgtgtgtgtatgtatgcatacacaatacccacacatgcatatacccttctagtcagaggtctcccctcccccttcttcccacccccaggtgtaagaaggacgattccaggaacctaaggctttgttactctgccccattttcaatgaagggtaggagggagttagacaggggttggggcggggccagtgagcaggatgcctgggtctccagttcctgccagtgagtccctaggcctccatctctctcccttgctgtaccaccttcaccaccatccatgcgaccccaagagccttaatgactctagaagagactccaggcaggggaagctgaaaggacctttcactccctacttttggccagggccttctgtgccacctgccaagaccagcaggtaaagtgggaggatgagggcgtggagaaagggtggacatagaccaaagtgcaaaactccaccctagaattaaggagagaacatgagtcttgacaggaggtgtccttagactggggaaaataggtctaaaaggaaagaggaacgtgaagaaggtggggagattgtctcaagcagggtagagcccggggcgggagggaggtgtttggtcaggttgtggagtttgggactctgggcttgcccccgtgggatctcctgagtgtgaagtcagtggtggatggaagggagttggttagggaagttcaggatggcagcaatcaggagagaatgagacgttggttgggtgcccaactgccgagctgttctgttagcggcccgcccggtatcttggtctcccaggtttgggatgaagggagaggctgtgagtgattagaaagaagggaaaatagaagcagagctgccgccggcgcgggaagaagatgaggagcgcagcaaatggagaaaatgtgtccaaagccccggacatattcgagggagggtggagcaggttatggtgaactggaaacctagaaacgggcctctccaacttcgaagttcccagagtcgggggcgccgggcgcgggcgcggcgggcaggctggggtggggggcgggcagctatgtcgtcaggaacggggcggccccgctgcggccgcgtctgcctggcccgtcccctccagcccagctcgggctccagctccagcgccggcgcttcagctgcgaccgcgagccctctcaagcaaggtagagaccccgcgagccccccagcgccccaccctcccccatcggaaaaggacaggggtagggaagccgaggacccacgggctgcgttcgtgctgctgggtcgggaaggaggaagcgtgacagctggagcgggtatcgagaagggtctgcgctgggacgcgggggtgcagcgggagggctgggcccgaacccggtgggtaacgtttcccagaccttcccctccatccctcccgctcattcggagggatggtgaagcccggttcctgggacccgactcggagggaagtcctcttcggaacctccacagtgccgcacgggtggagaagggttcttgtttggcctccaggtccccaacttcccaccccatcctctccccacctgtcactgggaagtttctgaaaatacctgagtctgaatctcacttttcaccttgataggagaaatgagccttcctgaggaagaatggcaaatattactgggcatctcttcagcctcagcacagacaagcccacatcccccaaccatgccagtatcgtaacttcctcctatactacgcaatgacaccctctacacacacacacacacgcacacacacacacacacacacacacacacacaaccccctcagccaggtgtagcactgcagtcttcagtgtttgtggaggcttaataagttttgaggcttcaagcaaatgattccctcttgagggctacctactagcagcaacggtcagggagaggaggaggatacagtctatgatgtgattaaggaattcagaagtccaggtaatcaggcctgggccctcaaattcggggctcctgcccctctggggcagcctcaatattctggagacatagctatttcctgagtaatggtcgacttaaaggacttggaatgtgagcaatgaacgcttaagtgaaaaaaggaaactttaaatactaacacaggctttggaaacaatatttatctcttggttaaaattttagtatttgatgtttaaaattagatccagagagccatgagctctaagatttagtggaatgtactaaggatgggtgtctagagtctgactgtgcccttaagagagtaattctctctctatgcctcaatttcctcctctgtaaaatacgagggttggtgactcccagctctgtggatgttctaagattctctgcctccaagtcaacttcttcctttctcgccccaattgggtaggggcgggcagggaaaccagaggagggaagggaagggtgagtcacaaatagctggcaggctggcagcagaccccaccctcccagccctggccttcgcctagactagcccaggttatagcctcagggttgggatggacctggaggaaaaaaaatggacttgttctaggtcttcaagtccccaggatcccacagtttgctgcccttcagctccagggatagctaaactttcagtcagagaagtcaagaaaaccactgaaaagatcccaggagcactcgtttccaagattccagcccaggggtgtccttgaaccctgagagtctagctctagccacctcgtcatcctcccagaggcaaagttcagaatcctgatactacatgtttgcacctgacagatatattaataacaaggggtaagacgtacaactgggcttcactgatgctagcagtccctgaaatttatgccttcctggttcaaagacatcatttttcctaatctccagaaatgtttctctaggtactacccttgtgtaataatgataatagctgatgttcattgagttcttattctgtgccatgctgtttgctaagtacattgcatatatcatcttatttaatgcccacattgcgactgatttctgtaggtgcccactttactgatgagaaaactgaggctcagggagatgaaatgaccttttaaagagctaggattctgatccttgcctgtccaatttgcaagtccattctcttaacttctactgtatactacttctccaggtttaagacctggggagctaggaaggagcaagaaagagttagatcattgtaaaaagagaggcagagaagaagcctgtcctctctcctttgcattgtaacttgtttgctccctccttgtcactttctccctcagattccatttcctagaactttggagtcatcttagaatccccaggggtaatcagagaggctaattaagctatagaggccccattagccataagactattagtattcattaggtctgttggcagcagaagttggactatggtcattgaaaagtgccagatgggtagagtcctttctctaggatgtcagtatcccagaaccctcttctgagtgttcccagagagctgctggaataggaatggtgtgctgcataaaagtaggcagcagagatgtcccaagggaagaggctgcagagaaagttcttgcatcatcagaaaggaaaagggctaggctgttcttgaacacccaaactgcttcccttacccaacaagccctaaatgagtgggtggagatcagggtgtttgatggggtagtcaataagtgcttttcagcatcattcatttatttaacaaatatttatttagcacctactctatgtactacaaattatctcctttcctctgactgtcaggtggacactctggcatcctattcccatgtaaccatatttggattaatagccccaaattatgaatccccagctttacacaatcatgtgtacaaccaatattcagcacccactacatactgggaagggtatcccaggcagacagaacagtaagactcattgctttgagcaggggagagcttggcatgcctgaggaacagaaaggagcacagtgagaccagatggcggggtgtgaggagagagtggaacaagaggagggcagagggacaaacagaggcactaccacatggccttgggctggagccttggattttccatctatcaactgccttaggaaatccaagcttctctgagctccagtttcttcatctgtagaatggttatgccaataatttcctatgtctgatgatttgattctaattgttagtacaataataactagcatttcttgtaggcctcctaaatgtcaggcattgtatgagtgacttttcatatattgttttacgtaagccacacaactgtgaaaaatggttctcattctccccattttgcagatataacttccccaagtcacacagtggtatcagagctaagaatgggacccagatatgactgatctagttctgttccaaaaccgtgctgtattatattaacgtaagatatgttattatcattactgaatcaaggaaagtcgcccactgcaccttggtccctggatccagtagccaaaacctggggctccctaagcactgctgacctagcggagtggaaggaagttcccaggagccgagacactagcactcggctccatcgtcccaggactgggaaacactagatctgttggcagcagaagttggattatagtcattgaaaagtgccagatgggtagagtcctttctctaggatgtcagtatcccagaaccctcttctgaggaagagactctgtgggtacccagagtctcttcccctgcctcttccctaccccgcgcctagttccccacccttccctagtggagctccgcggaacgcagtccaggcggggccggggctagggaccttgccagagctggttctgtgtcgcgcgtcagaagcgctagaggtcgttgcgtggcgtgggtggctcggggagtgggtggctgagcggagctggggtccctggccagaggcggaacaaaatggggtcatggccaggaagacgcgctaacgcagtaagagtcactcagagggccggaactgccggaactgccgaagacccgagatgggagagagctcaggatggggagagtctgcagagattgacgatggtggaagaaagcgcagaaacagacaagggacacacccacagaaacatatatagactgagaaagccgggtgcgggtgggaaggtgagggtggtcagatgaatcaagataggttgggggagagggagaaggatccagaaatggagagacagagatgagtcagagaaacagagacagaggacagacactgtcagggaaggtagaggcatagggaagagggacacagggaaaggaagatgtttagggagggactaggagagaaggaaagaacaaaaaataatagtgggagtagagacagaatggaacagacagaagaaaagacacccagacagctggctcttcccactgtacgctctgtcacctttccccaggcctaccctctgaagaggtccaagcaacggaagtactactacgaagctgcctttctggccatccttgagaaaaatagacagatggccaaggagaggggcctaataagccccagtgattttgcccagctgcaaaaatacatggaatgtgagtcttcctgtcaggccttcagttctggagaccctgccccagagaatccctcctcctcctcattacaccccctgccccccagcttcctcagtggctttgagcagtgtgctgctcagatgtgcccatgactggaaatgggaggagtgggagatggggagatgtcagaaaaagatccggatctaccacagtctaactgggctgcattgtgcaaggtctcggctctctacccaccttcgctatacctggactgcttgctccagctctcagagaagaggagtaaagagtggtactgttttggaggatctgaaatatttttccctctgtatttctgtgtttcttcttggaatttcttcatctcatttgaatcttttttcctgctggatttctctggcaagagaactcagctggactaataatgctgttctcttactctctctacaccctagactccaccaaaaaggtcagtgatgtcctaaagctcttcgaggatggcgagatggctaaatatgtccaaggagatgtgagtggcagctgggaaatcttcttcttgatcaactcttcccatctttgtttttgatccccaacttccaggaattattctgggcctgcccctcactatcccctctagagataccctagtgtccattgtcactctgactattgctttaggataaaacaagggattctattaactcaggacttaatcaaagaaaccatactcctgcctcagatgcttctcagctctgcatttattatccctgtccccgctactcccaattcttcagccccagctctgaccttgcagactccccaggataatgctcactctcattataggccattgggtacgagggattccagcaattcctgaaaatctatctcgaagtggataatgttcccagacacctaagcctggcactgtttcaatcctttgagactggtcactgcttaaatgagacaaatgtgacaaaaggtatggtcaagcaggtaggactgggctaagcctctggcagaaaaatcaaactagtatggatttggggttgagaattaacttgagtcacacgttgtgcaggttgggggaaattggtggagaatagtcaggctggtctaggagctaaagggaggaaaggtaaaggggaaaggtaagtcgagggcagtggctcacacctgtagtcccagcactttgggaagctgaggtgggaggattgcttgaggccaggagttcaaggtgcagtgagcagtaatcatgccactgcactccagcctcagtgacagagcaagaccctgtctctcaaaaaaatcagtaaatcttttttttaaaaaaagggagaggtgggacaaacaaaggataaaacatgagccaaagtggagggagccctgacttctgatctgcttttttgtaaccagatgtggtgtgtctcaatgatgtttcctgctacttttcccttctggagggtggtcggccagaagacaagttagaatgtgagttgcccttctgaagtgaggtggcagggcagtgaagggagagagaggtgtttcccatcctcctttcccttattccttcaggattcctaaaggctgacaggtctagacaaaggtggggccagagaatgagcccatttcctgtgttctcccagactatttatacctaatacccttcaccatagtcaccccagtacccatgtcttgtgcattcccatgtaggcggcctaggatgtccttgggatatggattatgtattgtctcccctgacacattcactgagggtagagtccatgcctgttttcctttcctttttgtctctctctcagtcccatcccaggctctaggcttctcacccaaaagctctctccctgtctctttgtttcccccatattctggtatgaattctttgggtatctctcacaaactgaccctggcccccctaaaacaccccacagtcaccttcaagctgtacgacacggacagaaatgggatcctggacagctcagtgagttggggaccctgtatgctgggcaagggaatatgtgttaatttgtctgcaccctcctgccccaactcttccagggtcttaagaaacagaagaggatggggggagaggttgagtcctctaggactaaatttgaaagtaagtcccaagctcttgacccctcaaagagaatgctggatacatgaattgggtctgccttacaaacatacaaacacatttatttacttggcagacatacctgagaatgagaggtgtgaatctggggtggaacccaggaacactgatttctggaaaagagtttggatggtggtagtaaaggggatatggctgtggctcttgccctttttgctccaggaagtggacaaaattatcctacagatgatgcgagtggctgaatacctggattgggatgtgtctgagctgaggccggtaaggcagctcttccttcatgtcccttcttgtaccttcttccctggtgagtcctgcatctgccttacttcatctctgacaggcaacctggttcccttggctaggatggctgggctggatatcctaagaggcagtggagaggtgttgggtctgaagacccactcatactgaaagtccctttccactctgtgctcagattcttcaggagatgatgaaagagattgactatgatggcagtggctctgtctctcaagctgagtgggtccgggctggggccaccaccgtgccactgctagtgctgctgggtctggagatggtgagtaggagagactttgggggatgagtaagacagccttgggttatgcttgcccggattggccctgtaagggctttgacactccctagcatctactgtgccttcctagactctgaaggacgacggacagcacatgtggaggcccaagaggttccccagaccagtctactgcaatctgtgcgagtcaagcattggtcttggcaaacagggactgagctgtaaccgtgagtaatgggagctgggaggtaggggaagagggtcagcccagctatctgtgggagcttgatgctgtaaacttagaaaagacctaggtttgaatcctgggctctgccactgactagttatgtgaccttgggaaagccacatcacttctttaagccttagtttcctcaactgaaaatgaggtaattgtgagcattaaaaaagttggtgcaagaaaagtgcttcagatggtgcatgcacatactataaaatgcaataaaaaatatctattatgattactgttgctgttagacctgggcctcccaagcattatccagctcagttcctgcctggcacatggatggtgtggggcaggcatgcagtagcagctgatcttttaggaggaagagtaaggaaaaggcgtgggttttggaggtgggcacttcaccccgaacttttattctgctacaccctcaagcaagggatcacatatctgatcctgcctcaccctcaggtaagaaggaaatagggggagaggctcagctaagcctcccaacttcttccttctccctcagtctgtaagtacactgttcacgaccagtgtgccatgaaagccctgccttgtgaagtcagcacctatgccaagtctcggaaggacattggtgtgagtgatctcatgcctccacccccaacatcacctacatcctggccctggccctggcccttggcccattgctgccctcagcccctccctcccctaggtcctgctcagaccctgccagacaaggaactgcctttctccccaaggtccaatcacatgtgtgggtgcgaggaggctgtgagtccgggcgctgcgaccgctgtcagaaaaagatccggatctaccacagtctgaccgggctgcattgtgtatggtgccacctagaggtcagtttgggagccatcccttctgggtgcgtcttaccccgcagagctgccttctccacgggcctccggccacacctcctttacaggcacagttgcccctgctcccaagggctctttccagcccagactgccaggttgagaggagacagggttaccttcgtgatctctctgtgcccacctcgtctttcagatccacgatgactgcctgcaagcggtgggccatgagtgtgactgtgggctgctccgggatcacatcctgcctccatcttccatctatcccagtgtcctggtgagaccctcggcagcagcggggaggggacaggagtgcctccccgatttcccacacgcacagagtggcatttagaatagagagctcatacttttaggattcaagtcagacccctctatttagggattcatgcacaatacagcttttcttccctctactttcttcccctcccaggcctctggaccggatcgtaaaaatagcaaaacaagccagaagaccatggatgatttaaatttgagcacctctgaggctctgcgggtacagggctgagagtcttgggcttcatgatgggggcaggtttttcactggagccctcatgggtgggaatgaagtgggagagcctggtggggagcggttgatgctcactctccagaaactccaccatggtaggggagggaaggggagggaaacaggagggaggggggaaatatcttggtggaatgctagccctctgcccctgtctcctgggcccaccttaactctgacaaaatcctgctttctttgtccttattttcttcccccaatgcagattgaccctgttcctaacacccacccacttctcgtctttgtcaatcctaagagtggcgggaagcaggggcaaaggtgaggagaaatatattgggtcttctaagatgagaggcagggcctgcctgcaacacttagaaggtggaaggggatgtgtgtgtctggaggggcataccttgaggaacacacaaagagggtgaggttcagaagatcacccccaacccccgcgcctgccatgaacttttctttttcccacacacagggtgctctggaagttccagtatatattaaaccctcgacaggtgttcaacctcctaaaggatggtcctgagatagggtgagcacaggttagggactgtatcacagtgttttcgtgggtctgtgtatctgtatatgttaggagagtgcaggaaagagtgcagattgggagaggagggctagagatccccaagaggccagaattcagaatatttccttccctagggtcactgggtatcccatcctccgagctctctggcccatctttgtcctgctctcaaagaatgaagatccaatttttccctaaccactgaggagtggctataactttccccattgttcttttctgtgaccttcatagaaactcaagtcttttgacaaaaaggaggagggtcctacggaatgagagacaagaagcaatctgcctgctcaggacttgggtagcctcagtcctgttatccttcttcatattctctctcccctttgtctcaggctccgattattcaaggatgttcctgatagccggattttggtgtgtggtggagacggcacagtaggctggattctagagaccattggtcagtgcagggaggggcgtggggaaggtattggggtcgtagtcttgcagagctaactcactccatccttctcttcacctgcctccgcagacaaagctaacttgccagttttgcctcctgttgctgtgttgcccctgggtactggaaatgatctggctcgatgcctaagatggggaggaggtaagtggttagaaattgttttgctgtaggctgagaggagttgtgtaggaagggaaaggcacttagagaagaaactaggcatctggtatggaaaggattggggaagaagaggggcacagacaggtggatacaaaagtggaatgtccaaaaagaagagagctttggaagaagcagggaccacaatctgaacctagaagggtcaagggtgatagtcccctttcctgtaaatatttttatgtttctcccaaccaactcttatggctcagagaatcaaggaatatgggggtggggaacaatgtgtgaataaggaaggttgtataagagctaagccagatgctgaatgatggagctagcaggtcatgactcattcactcattcaaacaattaaccaggtagtcattaattaattcactatgatttctttcagagtattgcaatagtctcctaactgctctcccatttctaatctcttatgcctttcaaacagaaggagtttgagggatggtattggtagataaagaggtcagtgtagggcagattgtgtttgaggaatcttggagttgaggttattgggttcagggtccagctctaagatcttgctggagatcttagggaatagagatctgctaagggcagcggaaggcattctaggtggaggaagtagtgtaaggccagaggagccaccaaacaacatggtggtgcattgggggaactgtaagtcattcatcatgattgggacatagggtgaaaggtggaaaatgtggagagggaagactagttgagcagagtccagatgatggagggttatgaatactgtgccagggagtttttaattttatcctgtcagagattgcaagctgacagcccacagtaatgattttgtgttgttttgtattagttgccttgcagtgttttcaatttctttgtacttgattatttctaagtgggacatgtattcttcagtttatcacaatccccttggctccctgctagtcacttattcactttccctttcttttttttttttcttgagatggaatctcgctctgttgcccatgctggagtgcagtggtgccatctcagctcactgcaacctctgcctcccaggttcaagtgattctcctgtctcagcctcctgaatagctggaaatacaggtgtgtgccatcacgccctgctaatttttgtatttttagtagagacgaggtttcaccatgttagccaggatggtcttgaactcctgacctcaagtgatctgcccacctaggcttcccaaaatgttgggattacaggtgtaagccaccatgcccaacccactttaccattcaagccactcaggtatttgagtgtgcaatccctgaactatgagcaaactctttttttttcttttctcttttttttttaactcaatcaaacaagcagcagtgagggggaactcgatgtaagtaaaagatgtaactaaaagaacaaataggaagaaatatctctgagtgctcattataacttgttttatatatagacatataaccaattctttgaccagttttcagatcctcaacatctgacttcttcatttataatattagatattttgaaattacatattttatgtcttccctgtattctgcaaacaaaaatcaagttagcataaacaagcaaacaagttagcagaaaacattgcagttttctgctaactcaacctgaatcatgacaataaggatataaatgtagcactaatgaaaatgtatgttgggctgggcacggtggctgattcctgtaatcccaacactttgggaggccaaggtcagaagatcgctttaagccaggagctggagaccagcctggacaacaaagtgagaccaagtctctacaaaatattttttaaaaaattagctgggcatggtggcacgcacctgtagtcccaacaactcaggaggtggaggctggaggattccttgagcccaggagtttcaggctgcaatgagctatgattgggccactgcactcaatcctggctgacacagtgagatctcatctctaaaaataaataaacacacaaataaatagccaggcatggtggcacatgcctatagtcccagctgaggctgaggcgggaggattgcttcagctgaaaagatcgaggctgtagtgagccatgattgcaccactgcactccagcctgggcaacagtgtgagactttaaattaaaaaataaaaaggaaaacatgttgacactgaaaaaatcataaggttcgaagaggggggattgaagggattatcactatgggagctctgtggaagatggattgtaggaaggagacagaataggaaattacctgtttgcagtagtccagacaagagatgatgaatacagaagccaaggcagcagcagtggagttaatgaggtagaagccacagctctggataactgataggttgtggagaaggaggtagagaaaagtctaggacatttcctaggtttgtggattcagcagatggaggtggcatttatttattcatttattcatttatttatttttatttatttatctttttgagacagagtctcattctgttgcctagactggagtgcagtggcacaatctcagctcactgcaacttctacctcgcaggttccggcgattctcctgccttaccctcccgagtagctgggattgcaggtgtccaccaccacatccagctaatttttgtattttaagtggagacgagatttcaccatgctggccaggctggtctcgagctcctgacctcaggtgatccgcccacctctgcctcccaaagtgctgggattatatgcgtgagccaccgtgcccaaccttggggtggcatttattaagacagggaatataggaggaagaccagtttaaggaagaaaaattcagtttggggcaggtggagatgttgtggtgggtggttagaaatacatgtcaggaatttaggagagaagtcaaatattttaggagatacatgtttgagagtcatctgctcctaggtggtaattgacattctgaaagtagctgagattacccagagaaagaggtaagagaaggtgaacaaagacagcaagatcctggtaaacaccctatttaacagttgagcagaggaagaggagttattaaagggtctgcattagcgtcccattgctgctgtcgccaattaccacaaacagtggcttaaagcaacacaaatttattgtcttacagttctggatgagagaagtccaaaatgggtctcactaggctaaaatcaaggtgttggcagggctgagttcttttctagaggctctagggaataatcctttgctttttctagtttctacaggctgtctgcattctttggctcaaggtcccccttccaaccagtggtcttatcactccaacccctgcttccacagtcacatctccttttacaactcttttctcctgccttcctctttcacttataaggacccctgtgattacattggtaccacccagatgatccagtatgatcccccatctcaaaatcctcattttttttttttttaagacagagtctccctctgttgcccaggctggagtgcagtggcacaatctcggctcattgcaacctctgcctccctggcccaagcaattctcatgtctcaacctcccaggtagctgggcttacaagcctatgccaacacaccggctaatttttgtatttttagtagagacaggtttcaccgtgctgcccatgctggtctcgaactcctgacctcaagtgaaccacctgcctcagcctcccaaagtgctgagattacaggcgtgagctaccatgcctggcccagaatcctcaatttaaatgtatctgcaaagtctctttttccatgtaaggtaacattcacagtttctttttttctttcttcttcttttttttttgtttttgagagggagttttgctcttgttgcccaggctggagtgcaatggcacggtctgggctcaataccacctctgcctcccaggttctagcgattctcctgcctcagcctccctagtagctgggattacaggcatgtgctacaacacctggctaattttgttttgttgttgttgttgttgttgttgtttttggagatggagtctcactccatcgcacaggctggagtgcagtggcgcgatctcagctcactgcaacctctgcctcccaggttcaagtgattctccggcctcagcctcctgagtagctgagattacaggcgtgcgccatcacaactggctaatttttgtatttttagtagagacagggtttcgccatgttggccaggctggtctcaaactcctgacctcaggtgatccacccgcctcggcctcctaaagtgctgggattacaggcgtgagccacctcacccagcaatattcacagtttcttgagattaagatgtggacatctttgagaagctagtattctgcctaccacaaagactaaaaaggaatagtcaaagagaaaggaaagtccctctgtaaccgagagagtgatatttcagaggttaagtgaagactttcaagagttaaaatgagaacgaaagatacactgttggcaggagtcattggcaatctttgccaaaaaagtttcagcagggtgggatgggcaaaaggtaaattacagtggattgaaccctcagtggagtgtgaggaagtggagactttttttctttttctttttcttttcttcctttctttcttttttttttttttttttgaggcagagttttgctcttgttgcccaggctggggtgcaatggcgcgatctcggctcattgcaacctccacctcccgggttcaagcgattctcctgcctcagcctcccgagtagctggaattacaggcatgtgccaccacgcccagctaattttgtatttttagtagagatggggtttctccgtgttggtcaggctggtctcgaactcctgacctcaggtgatccacctgccttggcctcccaaagtgctgagattacagatgtaagccactgcgcccagctgtggagacatttttaaaaccttttttcttccctgactacaattataatacatgctggtggtaaaaaataactcaaacatttcatatacatgtgccaagaaagtgaaagctccctataatctatgccctacagttttgggggctgttcctccatgttttacttcctagacacaaactaacatgtatttaaacaatgagatcattttatagatgtttttcttctttttctaacttaacagttcatattgattatcattatatttctatacagtcaggtttgcctcatccattttagcactgaatagtgttccgttgtgtgaatgtgtaatcatttataaacagttccctattggtggacattagggtagcattcagttttttaatcttacaaaccatggtgcagtgaacactcatacatctatctctgcgcacagatatgaacatttctctaggagagacttctagaagtagaattgcttactcggagaatatgaacatttttattttattttatttatttttttgagacggagttccactcctgttacccaggctggagtgctatagtacaatctcggctcactgcaacctccacctccgggttcaagcgattctcgtgcctcagcctcccaagtagctgggactaaaggcacgcgccaccacgcctggctaattttttgtattttcggtagagacgaggcttcaccatgttggccaggctgatctcgaacttttgacctcaggtgatcctcccacctcggcctcccaaagtgctgggattacaagtgtgagccaccatacccagccgaaaataactattaatagtaaaatgttcatgctggacatggtggctcatgcctgtaatcccagcactttgggaggccaaggcgggtggatcatgaggtcaggacttcaagaccagcctggccaaaatggtgaaaccccgtctctactaaaaatacaaaaatcagctgggtgtggtggcaggcacctgtaatcccagctactcagtaggctgaggcaggagtaatcgcttgaacccaggaggcggaggttgcagtgagccgagatcatgccactgcacttcagcctggacgacagagctagactccatctcgaaaaaaaaaaaaaaggtattttctttttaaaaaactattcaaatagctgaacatggtggctcacacctgtaatcccagcactttgggaggccaaggctggaggatcgcttgagcccaggagattgagaccatcctgggctacacagtgagacctcatctctatgaaaaataaaataattaaccaggcatggtggcacacgcttgtggttccagatactcaggaggctgaggtaggaggatagcttgagcctggcaggttgaggctgcagtgagccagtgcactccagcttgggcaagagagcaagatcctgtctcaaaaaaaaaaaaaattacacaaatgggctgggcgcagtggctcacgcctgtaatcccagcactttgggaggccaaggtgggtggatcacgaggtcaggagatcgagaccatcctggctaacatggtgaaaccctgtctctactaaaaatacaaaaaattagctgggcctggtggcacacgcctgtaatcccagctacttgggaggctgagcaggagcatagcttgaacctgggaggcagaggttgcagtgagctgagatcatgccactgcactctagtttgggcaacagagccggactccatctcaaaaaaaaaaaagaaaaacttacataaataagtcatcagtacgttgtcaccgtaaagatttaaagactccccacaaaactccatgtacctcctcagagataaacattgtttcctatttacagtcatttttctgtttttacatgcatgcacacacacacacacacatatgcataaacagacatttttttttttttgagacggagtctcactctgtcacccaggctggagtacaatggcacgatctcagctccctgcaacctctgcctcccggcctcaagcgattctccctgtctcagcctcctgaatagctgggattatgggcacccaccaccatgcccagctaatttttgtatttttagcagagacagggtttcaccatgttggccaggttgatctcgaactcctgaccttaggtgatctgcccacctcggcctcccaaagtgctgggattataggcatgagccatggcacccagcgaaaaatatgttttgataaaattggataacattttgataaaatttgccaaaatgctttccaaaaatgacttatcaagtcatgctgtagctaacagcaaatgagaatgccaatttattcataaactcattagcatttggttttctgaatctccttatactttgccaacctgatatgcaacaaaagttagctaattgttttaattatggttcttgaaattgttagtaatactgagcacctttcctatgcatattggccatttgtattttttcttctatcataggcttgtttgtattatttgcacatttttccttttttgttttttgtttctttctttgttttgagatagtcttgctctgctgctcatgctggagtacagtggtgagctcacagctcaccacagcctcgaactcctaggctcatgcaatcctcccacctcagggtagcctggactacagtcacatgccaccacacctggctaattttttttttttttgagacagagtttcactcttgttgcccaggctggagtgcagtggcgcaatctcagctcactgcaacctccgcctcatgggttcaagcgattctcctgcctcagcctcccaagtagctgggattgcaggtgtccgccaccacgccttgctgattttttgtatttttatagagatggggtttcaccatgttggccaggctggtctgaaactcctgacctggtgatctgccctcctcggcctcccaaaatgctgggattacaggcatcagccatcgcgcccggcctacacctggctaatttttattttattttattttattttattttttattttttgagacggagtcttgctctgtcacccaggctggagtgcagtggcgcaatctcggctcactgcaagctccacctcctgggttcacgccattctcctgcctcagcctcctgagtagctgggactataggtgcccaccaccacgcctggctaattttttgtatttttagtagagacagggtttcaccatgttagccaggatggtctcgatctcctgacctcgtgatccgcccgcctcggcctcccaaagtactgggattacaggtgtgagccactgatacctggccaatttttatatttgttgtagagatgaggttttgccatattgtccaggctggtctcaaactcctggtctcaagggatcacccgcctcagcctcccaaagtgctgggactacaggagtgagccactgtgcctggccttgtttgtttgttttttgagatggggtctcactatgttggccaggctggtctcgaactcctgggtttgagcaatcctcctgccatgtagctgggattatagaggctaccatgtccgtctagttttaaattttaatataattatatttatctatctttttcttttgggcttctagttttgtatccattcaaagattataaaaacatttactaatgttttcttctagtacaaattctggccaggcgcagtggcctgtaatcccagcactttgggatgtttggggtatggatggtcacatcatgcaggtagcgagcatagaacccagtaggtagtttttcatgctgctcctccctttccccagcaccatttattgaataatctgtcttttccccatttatttgaaatgacatcacatactaaatttctatatatacttgagtctatttgggggctctctattctttactattgaaccttttattgcattcactctgcctgtataacactgtttacacatggttgctttgtactgtggtctgtctgaatggggagtgaaagcatcaggggtcaagggtgagagaggattatccccatttgtcacccatctttttcagcattctcctggctattctctccaaccttccagatgactgttggcaccatctttgcatatccacacacattggaaacattcaccctccacacagcatggaggaaaggtccatgggagctgtgaccatgcaccctgccctgtcactggctagggctgggaggctctgtagaaacagggcagaaggcccctgggaatttgtggagctgggagctgagaagaggcctctctgggacccagagctcagtgctaacctgtcttctccactcctaggttatgaaggacagaatctggcaaagatcctcaaggatttagagatgagtaaagtggtacatatggatcgatggtctgtggaggtgatacctcaacaaactgaagaaaaaagtgacccagtcccctttcaaatcatcaataactacttctctattggcgtggtcagtggaatggggcctggggagaagggagaaagggggggccaagcagtcagaggctggaggagagcagaaaaggagggggaggttaagtgacctgtgacacagggaaattgggagtgcagtacagtgctgagttgcaagggaagatcttgggacatgctgtggggagcagcatggggacttgggaaagaggggagaccgggagggagagattgagctctgtactgaccttcatgtcccgaactctccaggatgcctctattgctcatcgattccacatcatgcgagagaaatatccggagaagttcaacagcaggttagggaaaggagggggcagtgtgggcatacacagtgtcaggagccaggttttgaccaagtttgactcagattgctcagaagaacagtggcacctctaggaggtccccccaaccaaagccacccttgttccccatgggactaaagttaggaggttgatgcccttccctgtcacgtaccacccctgccagcactgtgtaacctgtccctccctactgggccttgtgttggggctgacacagaatgaagaacaagctatggtacttcgaatttgccacatctgaatccatcttctcaacatgcaaaaagctggaggagtctttgacagttgaggtgtgtgtaataagacttaaccctacatccttttcagcttcttaatagccaagtttctccctccatggcacccttaggaacttcccatattcttgaacctatgcttctttaacctcccagctctcctaccccaattctccaagtcctcaagatacactagtccctatttccattccttgcacacctccaaatcctgccttctccagtttgtcatctggtggagggagcgatcacatctatgatcatgccatgaggtgaggatctgtaccctccctaactgggactgtgccccctcctctcagatctgtgggaaaccgctggatctgagcaacctgtccctagaaggcatcgcagtgctaaacatccctagcatgcatggtggctccaacctctggggtgataccaggagaccccatggggatatctatgggatcaaccaggccttaggtgctacagctaaagtcatcaccgaccctgatatcctgaaaacctgtgtaccaggtgagaggagcagccttgggagctgagtgggcaggacgaagggaaagtgtgactccctatggggataccctgtttatgtaaaactttactccctacttcgtccccagacctaagtgacaagagactggaagtggttgggctggagggtgcaattgagatgggccaaatctataccaagctcaagaatgctggacgtcggctggccaagtgctctgagatcaccttccagtaaggaagactccaccagggtccctgagggaaggtgtggggctggggcagcagaagggtcatgggaatggtggggaggggctttactagatctccctcaatgacaaaaggtctcaaagccaacctaagaagcagagttttggtattcgattggtaaggaaatcaccaatgttccttggcctcctatagcaccacaaaaacccttcccatgcaaattgacggagaaccctggatgcagacgccctgtacagtgagtattgacgatcccagccaaaaattaaacccttgggctccatggatcctaaatccccattccacagcttctttacacccttctgatgcctgaacttcccctgcacatcattcatcctaaaccctgatttctcagcccctggtttccctatcgtggcctctctaggaacctagcaacccaccccaaaccccacagatttccctctaaatctctgaagccacagccccaaagtatcaggtcctgcctctgaatgtgctcccttcccttccagatcaagatcacccacaagaaccagatgcccatgctcatgggcccacccccccgctccaccaatttctttggcttcttgagctaagggggacacccttggcctccaagccagccttgaacccacctccctgtccctggactctactcccgaggctctgtacattgctgccacatactcctgccagcttgggggagtgttccttcaccctcacagtatttattatcctgcaccacctcactgttccccatgcgcacacacatacacacaccccaaaacacatacattgaaagtgcctcatctgaataaaatgacttgtgtttcccctttgggatctgctaagtaagtggtacacttccttcttttataccttcactccttaaatgacgtagattctcccaagaagcaacagaaaaaccagcatcaggctctgagtatttatttcagttaatagtagtctcccagggaagactgggggaaatataggtgtttctgtcaactccaggaaaatcacagcatcatatgagagtactcagacctgctgcccactgaggagggggctgttctcaccaatgggacaagagcagaagatgcggggtagacgcagccagtgactgctgctatgtggcaactggggtacggagaagtcttgcttcataagtctgcgcctgatattgggagaaggggtaaactggttagcaatggacaaaggtagcttgtctgtgcttctccaaagaagggaacacacccatatcccagtctgcttagccttgatcctagcttcctccccttctcctcacctccagggtttaccctctcttatttctgtggtaacctctgtccattcctccctcaccccgtaagctttcctgcctgaggaccatgccaccccaggcctgggggatctgcccttcttgcaggtagaaaactcagttcaccccaggcc

SEQ ID NO: 586 - protein, 928 aa, Homo sapiens
MEPRDGSPEARSSDSESASASSSGSERDAGPEPDKAPRRLNKRRFPGLRLFGHRKAITKSGLQHLAPPPPTPGAPCSESERQIRSTVDWSESATYGEHIWFETNVSGDFCYVGEQYCVARMLKSVSRRKCAACKIVVHTPCIEQLEKINFRCKPSFRESGSRNVREPTFVRHHWVHRRRQDGKCRHCGKGFQQKFTFHSKEIVAISCSWCKQAYHSKVSCFMLQQIEEPCSLGVHAAVVIPPTWILRARRPQNTLKASKKKKRASFKRKSSKKGPEEGRWRPFIIRPTPSPLMKPLLVFVNPKSGGNQGAKIIQSFLWYLNPRQVFDLSQGGPKEALEMYRKVHNLRILACGGDGTVGWILSTLDQLRLKPPPPVAILPLGTGNDLARTLNWGGGYTDEPVSKILSHVEEGNVVQLDRWDLHAEPNPEAGPEDRDEGATDRLPLDVFNNYFSLGFDAHVTLEFHESREANPEKFNSRFRNKMFYAGTAFSDFLMGSSKDLAKHIRVVCDGMDLTPKIQDLKPQCVVFLNIPRYCAGTMPWGHPGEHHDFEPQRHDDGYLEVIGFTMTSLAALQVGGHGERLTQCREVVLTTSKAIPVQVDGEPCKLAASRIRIALRNQATMVQKAKRRSAAPLHSDQQPVPEQLRIQVSRVSMHDYEALHYDKEQLKEASVPLGTVVVPGDSDLELCRAHIERLQQEPDGAGAKSPTCQKLSPKWCFLDATTASRFYRIDRAQEHLNYVTEIAQDEIYILDPELLGASARPDLPTPTSPLPTSPCSPTPRSLQGDAAPPQGEELIEAAKRNDFCKLQELHRAGGDLMHRDEQSRTLLHHAVSTGSKDVVRYLLDHAPPEILDAVEENGETCLHQAAALGQRTICHYIVEAGASLMKTDQQGDTPRQRAEKAQDTELAAYLENRQHYQMIQREDQETAV

SEQ ID NO: 587 - DNA, 2787 bp, Homo sapiens
  source 1..2787: mol_type = genomic DNA
atggagccgcgggacggtagccccgaggcccggagcagcgactccgagtcggcttccgcctcgtccagcggctccgagcgcgacgccggtcccgagccggacaaggcgccgcggcgactcaacaagcggcgcttcccggggctgcggctcttcgggcacaggaaagccatcaccaagtcgggcctccagcacctggccccccctccgcccacccctggggccccgtgcagcgagtcagagcggcagatccggagtacagtggactggagcgagtcagcgacatatggggagcacatctggttcgagaccaacgtgtccggggacttctgctacgttggggagcagtactgtgtagccaggatgctgaagtcagtgtctcgaagaaagtgcgcagcctgcaagattgtggtgcacacgccctgcatcgagcagctggagaagataaatttccgctgtaagccgtccttccgtgaatcaggctccaggaatgtccgcgagccaacctttgtacggcaccactgggtacacagacgacgccaggacggcaagtgtcggcactgtgggaagggattccagcagaagttcaccttccacagcaaggagattgtggccatcagctgctcgtggtgcaagcaggcataccacagcaaggtgtcctgcttcatgctgcagcagatcgaggagccgtgctcgctgggggtccacgcagccgtggtcatcccgcccacctggatcctccgcgcccggaggccccagaatactctgaaagcaagcaagaagaagaagagggcatccttcaagaggaagtccagcaagaaagggcctgaggagggccgctggagacccttcatcatcaggcccaccccctccccgctcatgaagcccctgctggtgtttgtgaaccccaagagtgggggcaaccagggtgcaaagatcatccagtctttcctctggtatctcaatccccgacaagtcttcgacctgagccagggagggcccaaggaggcgctggagatgtaccgcaaagtgcacaacctgcggatcctggcgtgcgggggcgacggcacggtgggctggatcctctccaccctggaccagctacgcctgaagccgccaccccctgttgccatcctgcccctgggtactggcaacgacttggcccgaaccctcaactggggtgggggctacacagatgagcctgtgtccaagatcctctcccacgtggaggaggggaacgtggtacagctggaccgctgggacctccacgctgagcccaaccccgaggcagggcctgaggaccgagatgaaggcgccaccgaccggttgcccctggatgtcttcaacaactacttcagcctgggctttgacgcccacgtcaccctggagttccacgagtctcgagaggccaacccagagaaattcaacagccgctttcggaataagatgttctacgccgggacagctttctctgacttcctgatgggcagctccaaggacctggccaagcacatccgagtggtgtgtgatggaatggacttgactcccaagatccaggacctgaaaccccagtgtgttgttttcctgaacatccccaggtactgtgcgggcaccatgccctggggccaccctggggagcaccacgactttgagccccagcggcatgacgacggctacctcgaggtcattggcttcaccatgacgtcgttggccgcgctgcaggtgggcggacacggcgagcggctgacgcagtgtcgcgaggtggtgctcaccacatccaaggccatcccggtgcaggtggatggcgagccctgcaagcttgcagcctcacgcatccgcatcgccctgcgcaaccaggccaccatggtgcagaaggccaagcggcggagcgccgcccccctgcacagcgaccagcagccggtgccagagcagttgcgcatccaggtgagtcgcgtcagcatgcacgactatgaggccctgcactacgacaaggagcagctcaaggaggcctctgtgccgctgggcactgtggtggtcccaggagacagtgacctagagctctgccgtgcccacattgagagactccagcaggagcccgatggtgctggagccaagtccccgacatgccagaaactgtcccccaagtggtgcttcctggacgccaccactgccagccgcttctacaggatcgaccgagcccaggagcacctcaactatgtgactgagatcgcacaggatgagatttatatcctggaccctgagctgctgggggcatcggcccggcctgacctcccaacccccacttcccctctccccacctcaccctgctcacccacgccccggtcactgcaaggggatgctgcaccccctcaaggtgaagagctgattgaggctgccaagaggaacgacttctgtaagctccaggagctgcaccgagctgggggcgacctcatgcaccgagacgagcagagtcgcacgctcctgcaccacgcagtcagcactggcagcaaggatgtggtccgctacctgctggaccacgcccccccagagatccttgatgcggtggaggaaaacggggagacctgtttgcaccaagcagcggccctgggccagcgcaccatctgccactacatcgtggaggccggggcctcgctcatgaagacagaccagcagggcgacactccccggcagcgggctgagaaggctcaggacaccgagctggccgcctacctggagaaccggcagcactaccagatgatccagcgggaggaccaggagacggctgtgtag

SEQ ID NO: 588 - DNA, 32707 bp, Homo sapiens
  source 1..32707: mol_type = genomic DNA
cgattaaatctaagagaccctggccctgaagcctcagtaattcaggtcctaggaggcctccctgccttgaggagacaccacccccatctggggccctctctaggcacgatccagaagagctctaggcctgaaggtagtgttacccgccatcgggtccatccccaaattcaaggtatccctgggtatgttccctctcctgtgccccttccccaaacccagtgggtctctaaattccagcggcgccgacggggttaatgttggctcatgtcaccgcctctgcacgcccccgctccaaacctgccagctgcagcggcgaatgccgaagcccgaaagcgagggaccaggcagccgtgggggtggaggggacacatcgcagtagctgagtgacaggcggcggggtgatgattggcagctgccgagctgcctggactaggacccgggcgggggcgcagaggtggtcgcaggaggcgccccacaccccgggccttgcgccctgagctaggttcgtgcccgtggtgggctgggccgggctcgctcccttcgtgccctgagcgggcgggctgggcggagcggcgccctcccctccggaccccaccggctggagagtgtctctaaggtgacactcgggtgcgcggcagcagcggcggttgcaggagctcgctctccgcccgggctccggctccgctccagccgtccggggggcgccgcggcgcgcagagcgcagcaccccgactccagccaggagcccccgcccccccggagcgcaggaggaccccggcccgcctctcccaggcgcagcgcccagcatctcgctgctcctgtcgtctaagcgtcggcgtcgctagggacctgcggaacccggcgctcccctccctccccgcctcgcgtccccggcccgggcggactggagactcgaacttgagcgggtgcccgaaaggccgcaggagccgcgggcggaaggcggccgcacgatggccgaggggcagggcggcggagggcagcgctgggactgggctggcggcggccgggcagccgaggaggaggtggtgcggcggcgatgccggcgcggggaggaggcccaggtcgcgcagccctggcccgagggttcccggggcacggccgctgggcccccggtggaggagcgtttccgccagctgcacctacgaaagcaggtgtcttacaggtaaggaggacgtgggcagaggggagcgcggcgcttgggaccacccctcttgcaggcgtcattgcacaaacgtttattgtgcgcccgccgcctgcctggcgctgggagtttagagatgactgccgagggatctctgtcttttcgtgtacagcgggaaggaggcagcttctgagactccttctctgcctgaaccgtgaaagccgtattcatccaatatgcagtggctgagggaacagtgtaccaggcgctaaggagaggaaagagccatgacattgttcttacaaacctctatctgctggggagagccaggagatgccccctggcccttctgggggaaagaggaaccccctcttcattcaacaggtctaccctgagctttcccgtgggctgagtctgtgccaggcacaggcttgtggaaatgactgagaggctccctgccaccactgtggagaccctgctgcccagagatggggaacagaattccctcctgaacccccatgccccagcaggccctggctggcaacctccaggggcagagggaacctccccacccccacccaacatcttcttaattcaactgtcttctgtcagtgtcagagtctcttggcctgccacctctgcccagagggtcctggaggagccagctggagtgggccccagaggtcattttggtgacctggggtaggacgttaatgagggaggacagcccttcagaacaagggtgggaaagttacacagaggttggagctgggacagcccagtacacaccttaccttcctcttcctctcccaaaccacagcctcaacttggacttgctgtccctctcaagcccttggcccagagtgacctcccctggagagtctagcagggccactagggcagctgcggtccttacagccatcggcctggttggagaggacaagttccctgtccacttacaaccatggggtgtttgggatatgtctgaggctgccctggttctcccagtggcttctgggaagacgtttcataaaacttgcccagccctgggagcttgaaaggcctcagtattcttaatggctctggggccatcagggctccatcacttgggggaggaagggacagaaggggaggggattttccaagaagcaagatgctcagagcaaatgggaagcaggccaggttcccatgggccctacctccaccttctagggtatactagaaatcgtgggtacaccgggctccattaccaagttcttccagaacaccacgcccaggggagtgcatcatccatcccatgcctctggctgtaggtatgaatgtccccctggggcaggaggaagtgcagagggactcacaggggatgcagcaaagaatggagactcctgggataaatgtcagcctgggagtcagaagacctggtttctactctcaattctgccagagacttgtgtgtccttgagctggacaatatctctccctgggcgtcagttctttacttttaacataaggggatgaccccgagttttgccttagctgtgggtcagagacaaatcacaaatggaggctgggcgcggtgactcacacctgtaattccagcactttgggaggccgaggcaggaggatcacttgaggtcacaagttcaagaccagcctggccaacatggtgaaaccctgtctctactaaatatacaaaaattaaccaggtgtggtggcaggcacctgtaatcccagctactcggaagcctgagacaggagaatcacttgaacctgggaggcagaggttgcagtgagcagagatggcgccactgtactctagcctggcgacagagggtgactccatcaaaaaaaaaaaaaaatcacaaatggaggccagagtggagtggagacttagagggcagagagcaaagaataattgaataattaaagggctgagatagaaaatgttgcacacgtgcacgcacacacacacacacacacacacacacgcacacagcggcaagggctgggattcccctgggtggccccagaagggaggcccctccacagcccaaacaacttggggcctgtaatcaccaaggatgccaggtaatcccactgaggtccccccaacccctgcctccaggttacctgtgtgagggcggcagaaaacaacaccagggtggactctgctgtcacccttggacagatgagaaggatagggcatctcctcactccctggggttagtctaggaacccagtctcagtctcagagccgaacaaggcatcaaggcaaggagagcccctggtagaggacagacagacaagccctgggaaagagccagcagctcttccaggcccaggggaccccaggggaacaaactgtgctctccaactaagccctctcttgtggctgctgtcctgggtggcctgtggcctcctggcagggggactgggggaccgggggctggcaggagctcaggcccatggtggcccttttcacatcctccacatgccacagttccgtgcagctctggctggcagctaaacctcctaccctgctgtgcggagttgctaagaaaagcagttgaaagccctttccagagcgaaaaggcttttagacagaaatgtgggggcaaaaaaatctgagggcgaggagtggaagcggaagcgggctgaaggcctggctgcttctgacgtaagtgaggacgggggctttggcaggacactagaagcttagaggggtgtggggctttctcagaaataggtttccttcgcctcccagtgccagcatgggctggaagcaaccctggcagcttctttaggtggatggagagatggcgggtgtgtgccagcagaaactcagacacctggaaaggcaggggaggggggaagggcaagaaggcaggaaagaaggcaagggaagaacttcaatggggtatgtccttgtttggtttaaatgggtcctggtttccaataagtcataaaagggcagggcaggtctaggcatggtgactcatgcctgtaatcccagcatttctggaggccaaggcaggaggatcacttgagcccagggatttgggaccagcctgagtgacacagtgagaccctgtctctacagcaaaaaaattttttgtttttgtttttgagatagggtctcactgtgtgtgtcacccaggctggagtgcactatcatgatcatggctcactgcagccttgactcaggtgatcctcccacctcagcctcctcagcacacactaccatgcctggataatttttggtattttttgtagggatggggtttcgccgtgttgccaggctggtctcgaactcctgggctcaagcgatcgcccatcttggcctcccaaagtgctggggtcacaagcatgacccactgctcctggcctctacagattttgttaaaattagctgggcgtggttgcatgcgtctgtagtcccagctactcagaatgttgaggtgggaggattgcttaagcacaagaattcgaggctgcggtgagccacaattgcgccactgcactcgaggctgggagatagagtgagatcctgtctctaaaaaaagtggggggcaaggcagtagtgcctgagatcttgcatctccatctgggggaaaggaaaagtcactctcagcgtaaatgatcagggttgggctcaagagaccatgggagagcaggctccagctaggtaaagccagagtggggcaagggatgcagggcttggtctaaaaagatcagttcaaagatgcaggatttgcaattccagagttaaactcagtggcttccaaactggatcacctgggggtctctttttaaatgggttcttttttttttttttttttttttttttgagacagagtctcactctgtcgcccaggctgaagtgcaatggcgtgatcttggttcactgcaactgccacctcccgggttcaagcaattctcctgcctcagcctgccaagtagctgggactacaggcgcccaccaccacgccgggctaatttttgtatttttagtagagacggggtttcgccatgttggccaggctgttctcaaactcctgacctcaggtgatccatccacctcggcctcccaaagttctgggattacaggcataagccaccgcgcccagccttaaaatggattctaaagccctctccctagaggtcttgctacaggtgtatagggttgggcctggacgcctccatgctaaaaacctctcccaggtaattttgacagtggagcaggtttggaaaccactggttttgcctgtgaagaagccgaaggaaaaagagaaaagggcagggcaggaaacaaacaaacaaaaaaaaaaatggagggagggggtgtccaatgtgagatgactcactgggatgtggctggcggagggcttccctgtgctgagttctgttttggccccagaagggcctctaggaagaaccagtgcctgtacctggtgtcctgggtgtgggccaagcattacctgagatggaaatatgggaaacagtcccttcccttaacaaaagtgtgacccccatacagggtgagacagtaaatactttaggctttgcagggcactcgactctgccattgtggtgcaaaagcagtcatagacaacgtgtaagtgaagaagcgccagggttctgctaaaactttattcatagacactgaacttaacatttcatagaatttcagcaacgcaataccattcttttgctttttcccactcatttaaaaacttaaaaagcattcttgccgggcgtggtggctcacgcctgtaatctccgcactttgggaggctgaggcaggtggatcacctagctcaggagttcgaggccagcctggccaacgtggttaaatcccacctctactaaaaatacaaaaattagccaggcgtgatggtgggtgcctgttacccaagatactcgggaggctgaggcaggagaatcgcttgaacccggtaggcaaaggttgcagtaagccaacatcgcgccactgcactccagcctgggcaacagagcaaaactccatctcaaaaaaaaaaaaaaaaaaaaaaaaaaaagcactcttagctcctgggccctacaaaaacaagcagcaggctggatgtggccccgatccagtagatgggacaggacaagctcatgggaaacaagaactgaggcatcggaatgaacctgagcatggtggcggggggctccgtggcacatgcatcccaccaagagaggtcatgcaatgcccgtgcatccttctgggtcagagagacctgggctccaattccagccctgccccttcctagttgggtaagaggctttcacttctgaccctgtttcctcacacggaaaatgcgagcgatgataccttatcaagaatgtggctgggaagattcaagaagataccagatgtcaacttcctgactcagagcacgggtaaaacaagttagagcttttgtcctgtgtagctggacccctccgtgggttccagaggccctgtaaggtgtggagatggaggctggccccgagccacagatggtggtgggacccaggggtggtaaagtttaacagagactaaaagcaaggctgagcatgcgcgcatgtcccagcctacggtcctcccccttctccacccctgcagaggggctgggggcagggactgggcaccaactggcagatgaggatgccccctgccgtgggcacgctgctgcgggtccacgactcctcaagggaggggcacctgatccaactctccctgcggctatttaccagaagctaaaaataacccaagagtgacagggagatggggccgatttgtaatttaaatagcaacaggataaagcaaggagctgccagagatcacattctgtcctgaattaacaatgcaaaaccaggggcagagagctgagctgagcagggggaggggaccacggccagaggaagcctggggtccatcaattttctttcctttgaaaagggcggggcccaggcccagcccggaactccttccctcccctcagggacctgcagttcttgctgatcagtgagtcaaaggccagagagggcagtgccacactgtcccagaggccaacgtgcagggatcgggatcccaggagagggtcttatctgacctcattttggcacaaggagcttgggacgtgcccccagcagcccatgtcccccagtccccgcaccaaggggcacagccacttgggcattttggagggaacctgggaaggccagtttgatcaatggcatttgaagaacttatttggtggcctgctgagatggtggcctgtgggccaagcatggggaagcctggagtggagtctcatttttgcctcagttggtgcctttcagagttttcagaaaggcccctccaaggtccagggtgccagggacaagggttagtaccaactggagaaaacctctcttcaatgacatacaaagagggtggggaaggaactgggactggactctaggcttctgcagggctccagtgtgactgacaagggctctcggcctatagatgcctggaaaaggctaatcagagattgcagagtaggcagtgctttggaggccactgggccgcagcttacaaatgaggagctaaggttggcagaagttaagcaatgtgttgagatcacagagccagtaactggtggagccaggatccagactgagatctgtttctctccaaagccctttttactctgtcaggcttgcaaaggcctagactttcatccttgaggatcttgcttttggctctgtacaaagtgtacatatctctgggtgtggtaataggataggtagtaagggggctgaaaggtagctatgcaatcagggcttatgaccctacagatgtgagtgggaggcttggaaggcaggagacacactgaccgtgtcgtgggggcttggtgtagtccagggtggggacagatggaaacttttgagcagatgcagctgacccagactaaggggagagctgtgcaggctcctctctcacctccaatccaggaaattgggaggtgccaaaggacagctttcaagagacatggtggtttgaaggaccacctttggctgctgggccgccagtgctgtgcctgcagctctcttgcctcagcaggagagggtctccagcccctcctccaggtttcctcctgctcatgactttcgtgaagctacccaaaaggaacctagtcaaatgtccatctgtcactagccagcagcacctgcaacccagctcagacacatctgtctcctctgtgggggcagaggcccagcacttcagcaggggccagtgatcagcaggtgatcccaggctctgggttgctcccaaaggcttcagcaggtgcccagatcacaggcatagctaatggggaggcatgcacttaaacttcaaaatccttgtaggacaggcatggtggctcacgcctgtaatcccagaatgttggaaggccagggcgggccaatcacttgaggccaggagtatgagaccagcctgggcaacatggcgaaaccctgtctctactaaaaatacaaaaattgccaggtgtggtgggacatacttgtaatcccagctacttaggaggctgaggcaggagaatcgcttgaacctgagaggcggaggttgcagtgagctgagatcatgccactgcactccagccagggcaacagagcaaggctctgtctccaaactctccatgtctcaccatggccacttaggcaaacaagaagccagtctccctccctccctctgcccagccttctgaacacctgtattcaacccatggcaacttccataggaagtcactgagcacaaactcatgtacccagcactgagctaggagcaacataaggttcaagaattttgtaaggaagcaagactaagtgcacaaaaagtcagatgatacaggaatatcattgggaacaaaagtgagcatcataggtaagggatcagcaggtggggtggaatgccagttcaggagaagtgtttgacacttggtagatatttatgaaatatttgtcgtacaaatgaatgaaggaatgaatgaccaaaaacttggaaatcaggaaagaagattcaaatggaactgtcagatctagagcagatcttagaaatcatctggtccaacccagagagggtaatgactggcccacagtcacacagcaagggctggagtgtgaaccaatggactccatgtctgcggctctttctaccttcccacttttgctgcttgggctgggtctgaaggatggagaatgtgattggccaaatactcagggaagacaacctaggagtgcaacataggcaaagggaatggcaggggttagggccacatgtgaagggaatgcgaaaagggggaggaggggaggttcatttagcacctactatgaggcaggcactagcatggcatgagctgagagaaaatctctgcagggaaagcctggacaaagaggcggaaaagcaagaacagccagagaacgtaaggagccgcgaaggtcaggccaaggaggctggctgggcgggttttgacagcagaggatgtccaggtcgtgggttgagtgtttgttgccctggtacatttcttttccccagctcccacttgctcatccaggccacagaaagtagaacaccaacctctggggcctcaacaaagcccagaataattttcttacccagattcttcttcctgtgtgtacctgggtggattctgaggggtccccagcttcccagggctggcacatgttgtcctaggaactgccaagggcatcctccatagtcccatgcacctgtcccttccagccgtgtcctccccaccccacctggaaagcagagatgacattgacagcgccaaggagtgcaagttcaaggtggccctagtctcacagtcaggactgccctgcttcttgaagcctccagcctgcctgcttcccctccaggagccccatttcctgctctctgcagctccagggctgccagacgcctcagatggaaaacaagcccagccccatttcctctgtttaactgctcgagctacttgcaaaatgcctgcaagaggaaggcagggccctgcacagcctccttccagaatagaccttggtctggtggacacagtctccgatgaggccacagcatatagaacccatcttgaggcattcagagataatgggttggagaggaaacgtggaaaagtggggactgagccttgggggcattacatggccatatcccctaccttagagcagcaataggatgttttatttaagagcacagattctggggctagattctcacttctaccacttaccagctgggtgaccttagacaggtaagcttagcagccctgtgccttgatttccccatctgtaaaaggaggaaaataaggccaggtgcggtggctcatgcctgtaatcccaggactttgggaggccaaggcgggcagatcacttgaggtcaggaattcaagaccagcctggtcaacatggtgaaactccgtctctactaaaaatacaaaaattagctgggcatggtagcgcacgcctgtgatccaagctactctgggggttgaggcacaagaatcgcttgaacctgggaggcagaggatgtagtaagcagagatcacgccactacactccagcctgggtgacagagtgaggctcagtctcaaaaaaaaacaaaaaaaaagcaaaaaaaggaggaaaataacaagatctacctcctagagtcattaagaggattcaaagagctacgttacatattcagtaagatttttggcacagaaatgttcaggaactattagccattgttttatgattactgagtattaattattaattgcatagcatgcatttattaaacaaatatttactgaaaaatattatgttcccatcatgagggacacaaaggtgattacagcaccagatggaggtttttaagggtcgggatagcatcttgaagggttctgtagcataaatgtttactgaactgaactgatgctgtttctgtcctcaagaaattcacagtaacaaacacatatacaactaaagaactagttatagagcagggcgattaaagaatgcttgaggaaggtacagtttccttcctagaaccagtcctaagaataaagagtgaatatatgccctagtatttatttaccaaatcctcacaatggccttgaactccagcacagtttggcctctggagatctttccagctcctaacgcattccccctggctccctgttctctggccatgctggcctttttgcaattctccagacacaaatacattctttgttccatgcctttgctctgactctacttccacctagaatgctattctcccaggtaagtcacatagctcacgctccccattcattcaggtctgctctcaaatatcacctccccagagaggccctccctgatcccctccccctgcctaagtcactctcatcactcttctcccttcctttggcttcatttttctttatagcacatctttttttttttttagacagagtctcattctgttgcccaggctagagtgcagtggtgtgatttcagcttactgcaaactccgcctcccgaattcaaacgattctcctgcctcagcctccagagtagctgggattacggatgtccaccaccacacccagctagtttttgtacttttagtagacagggggtttcaccatgttggccaggctagtctcaaactcctgacctcaagtaacccaccagcctcagcctcccaatctttatggcacatcttgtttgctgacattatattgtacatagattgtttgtttcctgaatgtcttccccactagaatctaagctctgtgaggacagagccctgcttccttgtttttagagctatgttctccgatacggtgcctgatgcacagaaggcattcaataagtatttattgaatgaattaatttgtcaaccttcctatctcttctttattcctcagataacaccatgagctcaattttttttttttttttttggagacagtgtctcactcttgtcacccaggctggagtgcagtggcgcgaactcggctcatcacaacctccacctcccaggttcaagcgattctcctgcctcagcctcccaagtagctgtgattacaggcacctgccaccacgccgggctaatttttgtatttttagtagaaatggggtttcaccatgttggccagactggtctcaaactcctgagctcaggtgatctgcccacctcggcctcccaaagtgttgggattacaggtgtgagccaccatgcctggcctattactccactttacagatgagaaaactgaggctcagaaaatctccctggcacatgtattcattagtttatttgtttataggctaccttgtcccaaaagttatttagaggactccgagaggtttatgacctgatccaggccacacagagctggtaagaggcagaacaggacacatgctcatgtctccaggctccatcctcattgctcatttctctacaccaccttcctgtatgcccagccctgtgtaagatggtatgctgcacacagaagtgctaggaagagagcgctctttgagggctgggcacacccagccattgtacctggtggttgtcataaagcgggagacctcagcaggaccaagagttgaaaatcagacagtttaaatggagaggaaaaccagacaggagcccaggtgcagattccagcccaagcaagccccatggctgcctcctggctgctggtctgggcttgtccccacctgccccttgctttcttgtgcagctcttcacggcagctggccccagccagcggaaggcgcctatgagccctgagcctgtggtcctcagcttgggcggccagcggcctctagcaggcccccccctcgaccccacccccgtcaggaagtgccgaaagaggaagagagtcgccgggcaggatgagcgcaccgggggctggccacagtgccgggggaagctgcaatgaatcctcagctctgggcccagtggaggcgctggggacggaagaaggggagcggccggggtcactgaggcagatgtggcgctaccgctcctgggacgtgccacagatcccatcagaggcaccccagacacagtaggtacaaggggtggcctgggagtgggcatgggacctctgtccctctatgagccttttatctgagatgggggtgacagaagtagggtcacccatctgtcatccagcactctgcagaggcacagagtagggcaaaggagttattggcagggtgcagggagctctgatgtttggactgtgtggaggaactgagctcgagagaggccaggagttgagcaagctagcagtggggggatctgggaagaggagcccccccaggagtgtggcactggatgctggagatttctgacccagctgcaaggccttgtggagactccgtggggtcttcagttgcctctgatctcttctctcagagcttggagtaagagccattgggaaacttccccaaaaggacccatgcaccccagaggccagttgtcaggcatacttggggattgatctgccctcctcctggccaccctggcaccagctgctggctggagggctggagccccacctccctgatcagaccttctcccaacttgcaggaaactgggagagggttctgggcctcggggtgctggttcttcctcaaaatcacaggcttgtccgcaggtcacagccctaagcattggctatttgcggctgactaaggctggaaaacgggctgccagaacccaagaggggaggatgaaagcgaaggtgacacaggatgtggcttggcagagaggcgtgcacacagaagtagtgggcagctggtgtgggcagcagggtggtagggtttggggaggtggaagaccatgcttcccagctcctggcctcccttcgtcagccctgcgggggccatcagaaacagccccggtgtgtgtgatggctgtgcccctacaggtgactgcttgggttccaattgctctcatttctggagggggacggcctcggctgcattgtggggtgtctttgtgtgtgcatgtgaggtatatttctggatgggagtgtgtgcatatgcacacacatacatatgtgtgagggatgtggcaaccggtaaccattgtcctgggagtatttgtatgtaggagaaaggtgtgtgttctgtgtgggcatgtgtgcttgtgaatgggagtgtggtacctgttgtccttctgtgtatttgtgagtgtgtaagggctgtgcaggtgattcccgtagcatatgagatctataggttctgttgaatactatgtcaggaaaatgcgatgtgttgggcctgggtgagaaggttggaaaccattgtgaatagctgtggaaggatgactttgtaggagaaacttgtgagttctttgttggtgtgtgtgcgagtcattaagtgactttggtcactgagtgcgagaggctggggtgggaagtgttcgtttaagtaatgagtgggcataattgtgtaagggatgtgtttgttctgcgtgcatggggagcactgtgtgacttttgttcccctgggtgcgatttgggggagccaaggaggtatgggtggagattgtgagtggctatgagtagggtgtgcgagagcggaggggaggtggtgacagcagccctcgcgagtgtacacttgtgagcgtgcagttgtttggtagcggagggatcgggggaggaaagatgcgcgtctggatgcgcgcagtgcgagtgtgccaggccgggagattcagtcccatccaggcgggccgggccgggctgggggcagggctttctgctgccccgcccattcgtcgccccgcccctcggaccgccccagcgggctgcagcgcagcgggcgtccggcagagggcgctgcgggcccggtgccaccgtgcggccgagggggcgtgctcggcggcgggcaggcagcggcccggccagctatgcggggtcctgcggccgcggctggcggcacttcctggagcggcggcggcagcggcttcccgggcacctgggcgtggggagcgggggcgcgcggcgcggggcgggcggagcgagcgcgcgccatggaggtggcgggcggcgcggagcgggcgtgctgagccccggccgccggcccggcatgggcgtctcccgcgggccctccgccggccggggctagggccggatggagccgcgggacggtagccccgaggcccggagcagcgactccgagtcggcttccgcctcgtccagcggctccgagcgcgacgccggtcccgagccggacaaggcgccgcggcgactcaacaagcggcgcttcccggggctgcggctcttcgggcacaggtgagcggggcggcggcggggcaggcaccgaggcaccggcaggttaccgctccctcaccgggggacattcctcggccactgggggtccgggccacttcggtactgacactgagtcggggagaggctggcaccggcggcacgagccgtcttggcgtgggcacccactgggagtcatcccccagggccgggacacgggcgggatcggtcggcttggcactgtcaccgggtgggggtcattccctggcaccggcagtctagtgcgcctcatgtgtagtaccgtgggaggatcggctcccaaccctccagcaggaagatggaatcaccccagcccccggcacaagcaggttgggcccccaggactggtcacccacgccttcttggcactgatagaacagggcctctctgagcctcctggcaccactgaggtggggatcacaccgccctttggactttcgtgggaccaggttgcctaccatcactgcgtggcatctgcagaacgtagccccgttgataccgtcaccacacatggcttgtccccaagctctggtcactggtttaattgtttaacatgttaagcttctccttggggttgggggtgcctgatcatctgccctaccttgctcttaattagcagagagaccccagcccatccctctgctaggcaggcagcatgtctccctctaccctcttccagcccatgctgggaaagggatggggtgggctggagtctggaatctgctggctgttcaagcttcatcttgccccctcccccagcactccaaatgtcaccatcttgtgcctgtgacagagctttgaccaggactctagcggggaaccggggggagagtgtggaaagactgagtgcaggcagttcatggcaagtgtgctgctcttggtcgtgagccgctgcctgccctggtagccgtggtgtaaggtaagggacgtgaggccccaggagtacctgacctggctccctgcgcttcttcctgaccgagccttgcccttccctggtggccaaggagcttgtagccaatcagccaaggaccccagagccacctcagactgaactctgaccacttggagtctgcccaaggcctccctctcacttttctgcagctgcctagacttggtggcattcacccccaccccgccccttagctttgctctgccccttccctgggtagactttacccaccaataacatgggcggttttctcctgtcgtgtgggctagcatacccgtgatgctgacttgtgccctctacccgtctcacccgggctagggcccactctttgcacctgcactctgtctctgagcacatgcacagatctgaattcttacactggcagatggagctccgtgggctcctgtgttaccacgcaggcttcaatgtcatataaaacagagcagggagtgaaacttccagtagctctgttttgtcacccacagccctgcaagatggagcagtttacacccagctctgcaggatgtagcctccagtattcacaggctccgcagggggagggaggggcgccaccagaggcttcctgttgctgcccacagggtatcaagtgttgggttcttctgacctgtggctgtgccccttctgaagggcacaggtttgtgggtatagggatgagcacattcgggaggaagaacaagaaaccagagaaccaacagatacctttatgtaattctctaaaataagcagggtaggtggtattcttccttttgtaaaacaaaaaaaaaccaattttttgtagagatgagatctcacacagcattgcccagcctggtcttgaattcctgacctcaagcagtcctcccacctcggactcccaaagtgctgggattataggtgtgagccaccacacctggcctgtttctccatttttatagatgaaagaaacacagtcagaggggatttgctcagagtcacatagcaaggaagaggtagagataaggtttgaagtcaagttggtgtgattccaaaatccacatccctttctctataccaggatcccaaacggaacatcacaatggccaagggagctttaagaaatacagattcctagatcttcccttggcgtgtctgacccatcaggtctggaggtggggcctgggcattgtttgaagcttcccaggtgattctcatgtcccatcaagtttgagaagcacagtagtccgtcacgctggggagtgtaagtgctcttataggatgcctgatgagaggaaagaaaattcagcagcacctctggaagcatgtaaggagtgtcctttgtttgggagcactgtgctggggatagtggggccttcagaaatgaatacattcagagaacccagtagtatcaggcagagagcagcaagggaaagcactttctcctggcaggcctgggagctcactggggctggcctccttccctttgacttgatggggccaaggggtgggtgctgggggcagacatgtggaagggtggaatagtacacctgctctgggttctgccccctccaatgctgcttggctggtcctgctacctttgtttgtttgttgcagcctcaggtaaaagtcctcgaagccccagctgaaaccagcccttcatcttatcccagctccatgctagctcttaacctagctcttgcttctccccagtcatccaccccatgtcccccatcccgccccctccccaccccacccacatacacacatccagccttggggttgaggggcccgacgggaagatcaagggtaacaactaggttggcagtggctgctgaagccaggtggagaattctgcatgcgggccctggctcatggggagagttccatgaacaattagcagtgtctgctgtgggcttggcagggggtcttgatggcacatgggccacatgtttgccatcctggcccctctgggtaggacagtctctgaatggcagcccctgtggggctgaaagaggcttttccttaaagtccatctctgccccacacaactggcgtcatcctctcagaatcggggggtggcagcttgccatctccctttttttttttttttagctcagtgagccatgattctccccagcttgtggattcctcccaccccaactgcatcccaccttacttcttgccggaactatcagtctcctccctgaggaggaggaggaggagaggaggtacaggcccctactctgatcccagggtatttagttttcctctaccctgagcagagggcaggcaggacctttccatttaagcttctgttgaccctaaggattgggcagccaggagtgggagagaagtggactctctctcctcctccaggacccaccgggaaggaggacccgcttatcctctggcctggtctcagcagcctgatcctggcaggtcacagggcttctggattagctggttttacaccccaggggcatcagaaattacctggcacctcacacatgtagacataaggagccttggcctcagagcccctaggagcctgagcgtctgtgccgccatcccctgcccttcacggtgctcaaagtcacaagctcccagagggcaggaggcacacctgcagaaccagtgtgagacaatgggtcccatttagaggcactgccacacggccccagcgagcatggccctgaagtcagggctgcagagggtgcccagcgggtgcctgagcagaagcagcccctgtttgagttggttctgcaatgaatagggagggacgtgttgagggacgcctcttttgcagaggtgagaaccctgtctatggtgccagggtgtctgggagcgaaaggaaacctctttgagtggtttgtctcacctgggctaatgctgggagcagcccaggttgctgtgagaggcagggacaacctagaatccttgggttccagcaagtttgggaaagaaaaatgggcctcagtggccgagctgcgttcatctcactgtgtttgctccccacacaaggtcaggtgccagagtatacagctggcccctgctgggaacccagtgtagaattctcacagtctccctctgtgccaaacgctgtcaggggagggaatgacaattcttgtcattttgtctccatgccatactccaaaaaggtcagatcctgggatgtggagctgcccaggattctcggttggcacaggagcttgagagttggtgtcccctcaggcaaggacagaggaaggactaagtgacccctggtgagagaaagctgaggctccaggcagctgggctgggggagagtgagagaaacgggcctgccctcctcggctccctggaggcctctccagaattcgccagtggcccccccggggcagaggtgaaagtggagtcataggttagccctgagtcttaggccgcgcgggcccctcggagaagcagggatccggagcccttccacccactttaaggcaggagagaattgggaggtgtggaagcagcccctggaggctgccctgcagtgcctctggagcgacacaagggggcgacagctgccgttgtgggaggccggtgggcgaggagcttctccttccgccagtccacaggcccacggggacccacaggcactcgctggaagttacctgcagctctagctgccgggcggagccaatcagtgcggcccagggcaggctgggtgggtgcctctagcctcctggccccacccctcccgtcccctgaggcccaggcccagccaggtggccttgactcagccaagttctcgcagctagccggggtcatctgggactcccgcgctgggcttccagggccatgttcattaaggcctcatcacaggacccaggacaggctgaccacctctcctccctgccccctctgcctcctccttgaacagccctctaagtcagctgcgggggcagtgtgtgcaggaagcgggatctgccacacctgcggccaggttcttccgctccccgagttcctgggccacccctgagcggtgccaggcactcattccttgctcttcttggctctcctctgttccgtgtcggggtcagccccacatccagcctgcagtgtgggtttcagcacaggacttggctggcacttgggtcacaggtgtggagggtaggccaaaactaaccaaatgccctggaagagctatcattctgccatctttcctcttcaccccctgcctcgctgaaacaccagagacgtggttaggtcgggaaagcaggttcgagtgagaccaagggctctgtggccgcggaggggagggagaggctgaagagacaggagtggcgttccagctcctctgtctttggtgattaacagctgccagaagcttgtaaattcatcagtttcatgtgatcttcataacatctttgtagttggtttgattcccattttgcagataagaaaaccaaggctcagaaaggtcaggggcctggccaggatcccccagctcacactggagcccagcccaatgatcttctcatgacattgggccactctacttaggagtactcttttcttctattatttgccatccctaaactgggaagacctaagaagaggtttgagtgctccatggggtttagtgaaaggtctttgcctccggtgccaacggtgtgagacccatgagataatctgacctggacccccaagggagaatggccaccaagatccctcaagtcaggggagcaggctggactgggagagacccttggtaaagagactggggctgtgagcccgtcatcatgtggcgtccgggctgggtctggcgtggaggacaagtctgatctttttccttgctttaagggcgcagggagtctaaagcccaatggacatgctcagaggagcccccataccacccaggggtcggtggctggtctggggcagggaagatcgcttcactcgtacccagtgcctcatggtgagaggtctgagaggagagggagggccccagcatcctcctcatctacactgagacctcctccccttgctcctggcagagcatcagttcagagctcccacgtagaggcctctcccctgccagggatgagcccatctcagcacatgccaaaatagctgtctgggagcctgggcccgcaccgcccacaccccagcatctcgcgggttaacagcttgcctgtctctccgcccccttccccagcttgctgacattttacagagagaggcgggggcggttgtgaaagggggcaagctggttcttgctccccaacccacacggacaccccactgacacagcctgccaccacccacccacctctggaaggcatccccttgggggagaccttccttccatcctgagggccctgaaagggtgagggacaggctgccaaaaccatccctggtagacccagggagctctagggggctggtctccctcaaggggtcttttgtaggacacaggatctccctctgtcacccaggctggagtgcagtggcacaatcatagctcactgtaatttcaaacccctaggctcaagcaatccttccacctcagcctcccgagtagctaggactataggtgggggcccccataccgggctcattttttctttctttctttcttttgtagagacgaggtcctgctatgttgcccaggttggtctcgaactcctggccttaagtgatcctcccaccttggcctcctgagttgctgagattacaggcctgagccactgtgcccagcctctggagtctttttaagaaatgattttgaaatctttctaaacacattaaatatcttggcgttagaaaagtgtgcagaataaggtgacacctactgcctagcttggttggagcttagcattaggccatatttgctttagatagagatggaggcccctgtgtcttactccctggaggaaaccacaattctgattttggtgtgtgtgatgttcttgtgcctgtttttaaaattgtcctacataggtattcatgcctagcaacatacagtgctgtttcgtatgattttactctggtttaaatggtataccaggcatattctgcatttaggtttttccctcaatattgttttggagatttaaccatcctaaacatgaattctcacggatccattttaacctccacgtccgattccattgtgtaacagcagcttatttgcccaggctctgttgacggacacttgggtggtgtgcagtttttcgctattgcaagcgatccctctgtgttctctccaccagtgcttgctcacagggtctgtgtattttcagcttagacagatgttgccaaattgtgctccgaagtagttgtcctaatttttaggcctctgtgtttatttttttattttattttatttttttgagacagagtctcactctcgcccaggctagagtgcagtggtgcgatctcggctcactgccagctctgcctcccgggttcaggccattctcctgcctcagcctcccaagtagctgggactacaggcgcccgccaccacgcccggctaattttttgtatttttagtagagacggggtttcgccatgttagccaggatggtctcgatctcccgacctcgtgatccgcccgcctcagcctcccaaagtgctgggattacaggcatgagccaccgcgcccggctattttctttcttaaaactttcagtaaactggggaattgtttcccaggaacaaacactttctccttcaagcctgcaacactcccttgagagagacgagggtgggcattagccctatttatcagatcaggaaactgaggctgaggcaggttaaaaggcttagcttgaggtcatgtagctggtcagaggcagatcctctgggcctttgaagctaaacctactgtgaaggcctttgtcccctgtgtgagtagtgtggaagcctggagagtggggtggggccctgggggctgatgggggagggagcaacatggtcagaaagttgaggggggaggtgttaaattttttttttttctttttttgagatggagttttgctcttgttgcccaggttggagcgcaatggcgcggtctcggctcaccgcaacccctgcctctgaggttcaagcgattcacctgcctcagcctcccaagtagctgggattacaggcatgggccaccacacccggctaattttgtatttttagtagagatggagtttctccatgttggtcaagctggtctcgagctcctgacctcaggtgatctgcccgcctcagcctcccaaagtgctgggattacaggcatgagccacccgcccggccagggtgttaatattgaatgaggggtgagggggaaatgcttctcccagcagatggggaatgggagccctctgcagacacaggagaagacaaggatgggacggtcaccagagaagagtgggggcccgcgaggggtttataacaaaggggcccctttgggaggctaagggagatatattggcattcccatcagggatcggtttcagtgttgcctctgagacaccagagctcagcccagaccagacttgtccacccagtgcagcaggaagttctcgggagctggcccactcctggggctctgtgcccacctgaagcctgtgctgtcagcgggatccatgaggctgagtccagaccatgcgctgttccctccactcactcttcaaaccacacccagcacttctacactctggggatgccattagaagcaatgtgaggccctggggctcacagcctgtccggggatgcagatttgcacattagtgctgattgcccagggtctgagaggaaaaccatgagggagaattcactgagtagagaggggagtggtattccaggtagggagaccaccggatgccacgtggtgccacgtggaaaagggacccgcggtgttttgtttgccagaagcatccagggtggagcctgaggggtcgagggtatgtgccatggaacacactactgagttcaaaccccagcactgccacatgttagctggacgacttcaggcaaatgacttaaccgctttgtctctcagtttcctcatctgcaatatgaggatacgggccatggggataagaataccaactattcttaggaggattcgtagcttaatatttgtaaaaacacttagagtagtgtctggtggagtgagttatgtaagtgtcaaatacagcattaaaaatatgaaagagcagagaggaggctgggaggcctgttgcctgccagccccaggtctttgcattttgctcagctgacagtagagtcagtaaaaggtgattgggtgctttaggatgaattctgatggcagcgggagtctggcttggagggaggcactaaaggaatgggttggtcatttgttgcgcaaacatctctttgaggcctagcaggggctgagtcagggactcggatgtgaaagaagagactgggggtatttcaccaaggagctcaggccagcttaggatccccgcctagcccccaagcctctgagacagcccctcctcccctttccttgcccaccaccctccccttgtgacttcatgtcaccaaaccgactatctagttttcatgagaaagccatggagaacatggagcgggcgatagcatccagcccagaaaggggcctccaggtgtcactcttggggtcctctagagaggagaggaaggtggccacccaaaccaaggctgttgccatccccttgtacccaacaaagagaagtggcctgagccagctggagcctgtggtcagccgttgcatgtggttacacaaggtggaagaagcctttctcctcccttaaggtgctggcccctcccctgtggaattccctgttctttcctcctgcactgatcagcagtaaatgctggactcactgccaggcaccatgccgggcatgcccagatgcgctagacctggccccggccccccaggagctcgcggtctggtggaggagcaggcatgtgggctgaaagaagcaggcctcccagggctctagtggcaggggagccaaatgggcagtgcggagctgtgagtaggaggggtgttccgttggctgtgagcaggcagctgcttatcaggtagagagggaggccagtattcggggcagaaggtgtgccaggtgcggcggcacagcagtaagtcaggcacagccagattggggcacagagaataggctggcttggttagaactaaggcttcgtgtcacagtacaggaggcttagtgccacaccgcaggagccacgtctgccagggtggagaaggcagattcactctgaatcagtggtcttaaaaagtatggtcctgggggtgccctgacccatttcagggatttgataaagtcaaaactattttcagagataccctggttcctgccttttttttgctgtgctgatggcacaaaagcagtggtgggtaaaactgctagcccctcaacgcgaatctaggcaggggccccaacatcagagtccttactccatacatacatttctttaaaagtagtgaagatcattaattttataaagtctagacccttgtgtacctatatcttctgatattttacatgaaggaatatgaaatatatataaggcacctttgctgcaaaccaaactgtgatgaggaaaagctcttaactcgatgcagttgtaagctgtactagatgcttttttttttaagaacaccatttgtacttggacacctgatagacaaactagtcagatgtaggtatttggcagacattttctcaaaagtgcatgacatgagcttgtcatttccaaaacagtgtcattatttgttgccaggcacaggccaccatggctcatatctgtaatcctatcactttgggaggccaaggcaggaggatcacttgagcccacgggttaaagaccagcttgggcaacatagtgagacctcatctctacatatattttttaaaaataagtaataaaatatttgttgccaatgataaaatttgagcttttgagcaaaaatgagaattttggaaaccttttattcacttcctagagcctgacggcttcctcaggcttaaaatttttctgatgagatcagtagtgaagttagtgtgatttttggtattgtataataacatgtgggccaggtgtggaggctcacacctgtaatcccagcactttgggaggctgaggcgggcagatcacctgaggtcaggagtttgagagcagcctggccaacatggtgaaaccccatctctactaaaaatacaaaaattagctggatatggtggtgcacacctgtaatcccagcaactcgggaggctgaggcaggagaatcacttgagcctgggaggaggttgcagtgaactgagatcgcaacactgcactccagcctgggcgacagagcaagactgtatctcaaaaaaaaaataataaaataaggccaggtgctgtgaatcatgcctgtaatcccagcactttgggaggccaaggcgggcggatcacgaggtcaggagttcgaggtcagcctggccaacatggtgaaaccccgtctctactaaaaatacaaaaaaaaattagctgggcatggtggcccatgcctgtaatcccagctagtcaggaggctgagacaggagagtcacttgagcctgggaggctggggttgcagtgagctgagattgcgccattgcactccagcctgggcgataagagccagactccatctcaaaaataaaataaaataaaatgtgtcaccatttggaagatctgcataactcagtaaaccagtattttccaatgactggtgcttgatgttacaaaattcaaaatgcaaggtagtccagtggaaagttcattgacgtggttttatatttatatttatttatatttatttatttattttgagatggagtctcgctctgtggccaaggctggagtgcagtggcgtgatctcggctcactgcagcctccgcttcccaggttcaagcgattctcctgcctcagcctcccgagtagctgggattacaggcacctgccatcatgcccggctaatttttttttttttttttttgtattgttagtagagacggggttttgccatgttggccagactggtctcgaactcctgacctcagttgatccgcccacctcggcctcccaaaatgctgggattacaggcgtgaaccactgtgcccggcctgatacggttttagattccacattgcaactaacctttgagaaactgtcatttgtcatattttggtgtagtagcaaagaaaatctataattacctggaaaggctgttaaagatattccttctttttgtaactacatgtctgtgtgaggcagaattttcttcatatacttcaaccaaaacaacatgtcacaacagattgaatgcagggatagacaggagaatccagctgccttctattaggccagatgttaaagagatttgcaaaaaatgtaaaatgatgccactctttttgctaacttttttttagaaaattatttataaaagtgttgtttatattaacgtaatgggcttattgttttaagctagtaagtatcttaaacatttctcagttttaacatctgatatgatacatattaatagctgtcaccccctaaaacaaaactcttttgggatcttcaccaattttgagagtgtaaaggggtctgggagctttcaagttgctgaacacatggaggttcctggaggatggtgtgcccagggagggcgtggaagctcctcgcccctttcctcatcaaaaaaaaaaaaaaaaaggctgggtgcggtggctcatgcctgtaatcctagcactttgggaggccgaggtgggcggatcacgaggtcaggagttcgagaccagcctggccaacatggtgaaaccccgtctctactaaaaatacaaaaattagctgggcatggtggcaggtgcctgtaatcccagctactcgggaagctgggccaggagaatcatctgaacccgggaggcggaggttgcagtgagctgagatcacgccattgcactccagcctgggtgacagggcaagactccatctcaaagaaaaaaaaaaagagtttaaagaggtcttgggatcaggcagttggacagctgccactccagaccctagggtaccatgtcaggactgggagttgggggggtggcattccagtcaggatacatataacacagactggtgtcttctgggcgttccttagcttggcagagccagaagacccagaagctggagtcccagctcaaccaaatcggagttgtgggcagtcacgggcttccacaagcctcgagttgccccatctattcagtgggacagtagtgctgtctgcacaggggaaataccagcctcccgtttgtaatgctggtgaaaagtactttgtaagttgtgaaacactccacagatacttatttttgtgattgttttgtctggagccggtgtgattagcttccccagacctcagaaaacctgtccagtgggcgtgagaaggcattaggtggctaaatagggggcattagtggggggccccctccctaaaagggcctggctcccacttctccctccttagacctcgttcccaagctgaggcatgggctgggctgtactgggtgccaggtggaagggaggccactgggttgtcacccagcctggctctgggaaccttgggaaaaggagctgggaggcacgctcgtgcgctgtgtgcccgtccgcccacccgtcgcctgctgcagggcctggagccgctgctgggagaggaagtgcgttcagttaccaatcgggttattttcataacggctgtctcaggctgcagggaggagggtgacaagggggagggggcagaggagcagccacggctgctagctctccaaactaggacttgctcagcagaggccgccagcccggagctggatccagagcccggccttggggaccccagctcccacctgcgccctgccttccagatcaggtcaaaaggggcccccagcccctccttgctttctgcttcctccctctgtatctggctgggtgggtgcggggagggttggatccgggcggacccgggccccaccatccctaggcaaggagcctgccctgccaggttcctgaagctgatggaaaagggtccccccgagctcctgctgagccagggcagaccctgccgactaaacactcactggcctggtcgccttcttaccatccagcctggcccacctgctccccgaggtacattttgtttgttgtttttgacaggatccctgtggtgagtctcagcctggggaagggaggaggactctgcctccccagcccctaggctgactggggagggactggcctcccttccagcttccccacctccttccctccaacccaggtctgtgggagcagagccgagggggttctggggaggcagctgcaggcccttgctctggggctgctggaggtggggtcgccatgcaccatgcccagccttcacggagcagaaggcggacgaggccctgcccagggtgtggagtgggcgctctgggtcagtcccatggggtatcctgtgagagcaactcagggggccaggcctggtaccgggtgcagagggcattcctcatggcacgagcagatacccaggtgacacctgtggccggctctgttcctcatgcggtgggtggtggccaccctgggcactcctgcttccctttctgggttcctggcctcactgtgggcagacagaccccaggaggtagcacaatcacatgctctggtgtctatggtgggtgtaggccctgccaggccctgctgtctgccaggtatcaccaggcactctctctctgtcatcgcatccagacctcctttaggccaatcttctgaaccaggtggtgtgagctccattttgcagatgagaaaattgaggctcagaaaggttagtggatcagtctagggtggcagtggcagattcaggatgccaacgcccttgaaactagcacagggcgtgagatggcctgggctctggagggtgggtgtcctgtccgctccagctgtagctgatgaagctctccggcctgcctgccccgatagcagccactgcagctcggccacctgcagccacagccactgtccagcaagggtgcacggccagacaccaatggtcttgtctcctgacttcctctgtcctttcccaggccctgtccttgtcaggccccagagccggccaagggttgatggggtcccctgagtcctttcccatcctgtccccattggtgtaacaggctccccacccggagaccgagggacagccattttgctgtgctcttggtgttgaagccctcagggtgacctttacacgtactgtgtggcgaggtggaggtgaccaagagcacgaggtgagaagacactgtcacgcagagctgcgctatgggagaggcttaggcccagggcgggctccaacaaggcccaggagaagccccagcagagataggaagtgaggagtcaggctcttgctgaccagggacagaggtttctatggagaccagaggaacaggaaactcaggcctgcggggaggggcatgggagcacggaggcatgggtgcccagcaggagagcctgtgacaaattgtcagctcagccactctgacagcctccccagacacacagggaaactgaggcccgtgaggggccaacttgcacacagtcacacagcactgccggccttgcccaccccactctgctgggaggggcggcatcatcggccgccgaggagactcctggacagatgtggacctgggctgcctggcagtgtgtggagccgggcaccacaggagctcctgtaagccgcccttgtctctcgagggggtcctggcccctgttgtcagtgcaggtctggggccgcaagctgggctcagccctcaccgctgcccacgggtgcagcggcacctccccccactgactgtggccttttgttttctgggtgacagtagcatcaggcggtgtgtccgggtgactaatctcctccaggctgggcagctgtcacagggcggcctgaccaggcaggcaggaaagctgacaccctggggagggctggcaggccggtgccctgacggcagggggcagttgggccttcaggctcctcttcccctgacacaaagcaggccccaggtcgggaagacccgggttcaggtcccgaatgccgctgactggccgtgggactgtggcatgttactggccctcttgaagcctcagtttccccatctctagaatggagctgcaggtcctgcttacctcacagggctgtggtgaggattacacgagatgataaagtacttagcccagggcctgtcacgtagcaggtgttcgttattattccctatctggttccctttcctaccccatcccagcctcatgttccaggaggaaggaccctgcaacccaccccatttctgggacgcaggctttgccgttaggtagacttggactccagcactgactccacactgacttgccgtggactctaggcggtcacctctgcgtcaacttcctcatcaggaatgcagtgtgatgcagtacctattccttggggttgcagtttatgaaatgatctaagtgtttgtcaggggcttagcacagtgcctgacacataggggctcagtaaatgtcagccgtgacactggtgattttgggggagacccagcgctctccacccatgcctgctgtcctgcccctgcagctccctccggcccaggtggtctgctttgagtggggcactatttggggtcataagagcactgccctgacctccctgtcatctgaggcagctggaaactccaataggcagagaccaagagctgagctgtgcagaactctgcttccctaggcacctccaccctgtccatctctcccccaacacccctgtacctggcctgaagctgctcaagacctgcagggcagtagcaaatcagtgcagtgtatggaaggagaaggtgctagacgtgcggcctgggcctgactcctccagcccttcatctttgccttcatccttcctcctgcccaacatgcgtccagggcatcacccaccatgcctaattaatgccagccttcaggggaccacagggcttcttctgtcagccccaggcagcactgtcccagggctgtgaccttgacctctgtggctgccagcggttaggatgcatcccccaccagtctctccccaggaccagggcccaggagatcacctgctgtggggcacaggtggcctcaggtacctggaggcatcgccagcctgatcca

SEQ ID NO: 589 - protein, 1157 aa, Homo sapiens
MGKLRRRYNIKGRQQAGPGPSKGPPEPPPVQLELEDKDTLKGVDASNALVLPGKKKKKTKAPPLSKKEKKPLTKKEKKVLQKILEQKEKKSQRAEMLQKLSEVQASEAEMRLFYTTSKLGTGNRMYHTKEKADEVVAPGQEKISSLSGAHRKRRRWPSAEEEEEEEEESESELEEESELDEDPAAEPAEAGVGTTVAPLPPAPAPSSQPVPAGMTVPPPPAAAPPLPRALAKPAVFIPVNRSPEMQEERLKLPILSEEQVIMEAVAEHPIVIVCGETGSGKTTQVPQFLYEAGFSSEDSIIGVTEPRRVAAVAMSQRVAKEMNLSQRVVSYQIRYEGNVTEETRIKFMTDGVLLKEIQKDFLLLRYKVVIIDEAHERSVYTDILIGLLSRIVTLRAKRNLPLKLLIMSATLRVEDFTQNPRLFAKPPPVIKVESRQFPVTVHFNKRTPLEDYSGECFRKVCKIHRMLPAGGILVFLTGQAEVHALCRRLRKAFPPSRARPQEKDDDQKDSVEEMRKFKKSRARAKKARAEVLPQINLDHYSVLPAGEGDEDREAEVDEEEGALDSDLDLDLGDGGQDGGEQPDASLPLHVLPLYSLLAPEKQAQVFKPPPEGTRLCVVATNVAETSLTIPGIKYVVDCGKVKKRYYDRVTGVSSFRVTWVSQASADQRAGRAGRTEPGHCYRLYSSAVFGDFEQFPPPEITRRPVEDLILQMKALNVEKVINFPFPTPPSVEALLAAEELLIALGALQPPQKAERVKQLQENRLSCPITALGRTMATFPVAPRYAKMLALSRQHGCLPYAITIVASMTVRELFEELDRPAASDEELTRLKSKRARVAQMKRTWAGQGASLKLGDLMVLLGAVGACEYASCTPQFCEANGLRYKAMMEIRRLRGQLTTAVNAVCPEAELFVDPKMQPPTESQVTYLRQIVTAGLGDHLARRVQSEEMLEDKWRNAYKTPLLDDPVFIHPSSVLFKELPEFVVYQEIVETTKMYMKGVSSVEVQWIPALLPSYCQFDKPLEEPAPTYCPERGRVLCHRASVFYRVGWPLPAIEVDFPEGIDRYKHFARFLLEGQVFRKLASYRSCLLSSPGTMLKTWARLQPRTESLLRALVAEKADCHEALLAAWKKNPKYLLAEYCEWLPQAMHPDIEKAWPPTTVH

SEQ ID NO: 590 - DNA, 3474 bp, Homo sapiens
  source 1..3474: mol_type = genomic DNA
atggggaagctgcgccggcgctacaacatcaaggggcgccagcaggcgggccccggaccctcgaagggcccccccgagccgccccccgtgcagctggaactggaggacaaggacacgttgaagggagttgatgcaagcaacgcgctcgttctaccggggaagaagaaaaagaagaccaaagcccctcccctgtcgaagaaggagaagaagcctctgaccaagaaggagaagaaagtgctgcagaaaatcttagaacagaaggagaaaaagagccagcgagcagagatgctacagaagctgagtgaagtccaggcttccgaagctgagatgagactcttttataccacttccaagctaggcactgggaaccgcatgtatcacaccaaagagaaggctgacgaggtggtagccccgggccaggagaagatcagtagcctcagcggtgcccaccggaagcgtcgccgctggccctcagctgaggaggaggaggaggaggaggaggagtcggaatcggagctggaggaggagtcggagctggacgaggacccagctgctgagccggctgaggctggtgtggggaccaccgtggcacctctgccgccagctccagcacccagcagtcagcccgtgccggctgggatgactgttcctcctcctccagctgcagccccaccactgcccagggccctggctaagcccgccgtcttcatccccgtgaaccgctccccggaaatgcaggaggaacggctgaagctcccaattctctccgaagaacaagtaatcatggaggctgtggccgagcaccccatcgtcatcgtgtgtggtgagaccggcagcgggaagaccacacaggtgcctcagtttctctatgaagcaggcttcagcagtgaagacagcatcatcggtgtcacggagccccgccgagtggccgccgtggccatgtcccagcgagtggccaaggagatgaatctgtcccagcgggtcgtctcctaccagatccggtatgaaggaaacgtgacagaggagaccagaatcaagttcatgacggatggtgtgctgcttaaagaaatccagaaggacttcctgctgctgcggtacaaggtggtgatcatcgacgaggcccacgagaggagcgtgtacacggacatcctcatcggcctcctgtcccgcattgtgactctccgggctaagaggaacctgccactcaagctgctcatcatgtcggccacgctgcgggtggaggacttcacccagaacccacggctcttcgccaagccgccgccggtcatcaaggtggaatccaggcagttcccagtgactgtgcatttcaacaagcggacaccgctggaagactacagtggcgagtgcttccggaaggtctgcaagatccaccggatgctgcccgcaggtggcatcctggtgttcctgacggggcaggctgaggtgcatgcgctgtgccgcaggctcaggaaggctttcccaccctccagagcccggccacaagaaaaggacgacgatcagaaagactcggtggaggaaatgcggaagtttaagaagtcaagggccagggccaagaaggcgcgggctgaggtgctgccccagatcaacttggatcattactcggtgttaccggcaggcgaaggcgatgaggacagggaggcagaagtggatgaggaagagggggccctggactccgacctcgatctggacctgggggatggcgggcaagatggaggtgagcagccggatgcctccctcccgctccacgtgctcccgctgtactctctgctggccccagagaagcaagcacaggtctttaagcctccaccggaggggactcggttgtgtgttgtggccaccaatgtggccgagacgtcgcttaccatccctggcatcaagtacgtggtggactgtgggaaggtcaagaaacgctactacgaccgcgtcactggcgtatcctccttccgtgtcacctgggtctcccaggcatcagctgaccagcgagcgggcagagcaggacggacggagcccggccactgctacaggctgtattcatctgcggtttttggtgacttcgagcagtttcctcctccagaaatcacccggaggcctgttgaagacttaatccttcaaatgaaggcgctcaacgttgaaaaggtcatcaacttccccttcccgacgcccccctccgtggaagcccttcttgccgccgaggagctgttgatcgcactgggtgccctgcaaccgccccagaaagcagaaagggtgaagcaactgcaggagaaccggctgagctgccccatcactgcgctgggccggacaatggccacgttccccgtggcaccccgctacgctaagatgctggcactgagccgacaacacggctgcctgccctatgccatcaccatcgtggccagcatgacggtgcgggagctgtttgaggagctggacagaccagcggccagtgacgaggagctcaccaggctgaagagcaagcgtgcccgggtggcccagatgaagaggacctgggcagggcagggggcttctctgaagctcggcgacctcatggtgctgctgggcgccgtgggagcctgtgagtatgccagctgcacaccccagttttgcgaagccaacgggctgcggtacaaagccatgatggagatccggcgcctgcggggccagctgaccaccgcagtcaatgccgtgtgccccgaggctgagctcttcgtggatcccaagatgcagccgcccaccgagagccaggtgacctacctgcgacagatcgtgacggcaggcctgggggaccacttggcccgcagggtccagagcgaggagatgctggaggacaagtggaggaacgcctacaagacccctctcctcgacgaccctgtcttcatccaccccagctccgtccttttcaaagagctccccgagtttgtggtctaccaggaaatcgtggagaccactaagatgtacatgaaaggcgtctctagcgtggaggtccagtggatcccggccctgctgccctcttactgccagtttgacaagcccctggaggaaccagcccctacatactgccccgagcgggggcgggtgctgtgtcaccgggccagcgtgttctatcgcgtgggctggccgctccccgccatcgaggtggattttccagaggggattgaccgctacaagcactttgcccggttcctgctggaagggcaggtcttccgcaagctggcctcataccggagctgtctgctgtccagccccggcaccatgctgaagacgtgggccaggctgcagccccgtacggagagccttctgcgagccctggttgcagagaaggctgactgccatgaagccttgctggctgcttggaagaaaaaccccaaatacctgctggctgagtactgtgagtggcttccacaggccatgcaccccgatatcgagaaagcctggccccccaccactgtccactga

SEQ ID NO: 591 - DNA, 32659 bp, Homo sapiens
  source 1..32659: mol_type = genomic DNA
ccaagtagctgggattacagacgcctgccaccaggcctagctaaattttttttgtatttttggtagagacgggggtttcaccatcttggccaggctggtcttgaaatcctgacctcgtgatccgcccgcctcggcctccaaaagtgctgggattacaggcgtgagccaccgcgcccgtagaggcctccttttagatcttccatctatccctgtgatggaaatatttggtgcctttttaaaagtacacgactaatacgtttcttgtaggaatatcagaaaatacagatgcgcaaaccagggttggggggaagaagtttggagtactgggggcggggtatattttaaaaggtggcaaaacacttccactcccaagaagccaaattagtatcagtagatataattcatatttaaacccagactaccccaagcgagaacagcccaggacttaaactccggcctccgctgggacctcaggccccgcctacttctctaaatagtcccgccccctgcccggcccggctccgcctctcctcttcgctgggtttctcttgcaaccccgcccctcagcggcaaagtcagttacagttctcgcgataacacaacccggaagtctcacggccggagttggtggtctgggaacccacgtgggctgggtttcggattgctctgctggtccggccgctggagcgcccaccctggcctagtcgccatggggaagctgcgccggcgctacaacatcaaggggcgccagcaggcgggccccggaccctcgaagggcccccccgagccgccccccgtgcagctggaactggagggtaagacatccccggaccggggctggatttcggagatttcccagggcggcctgtgccctgccttcaggactctcgggtggggatcccagaggggtgggatggatcatctggaatgggggaatgggtccccccattccagatgatccaaaggagaggggcttagtgacagcctagttttaacagtgtatatggaatacccgggatttctctcgccctcaaatagtaacatggagaatttggcaaaaaaaacaggagtagttccatcccttcccatgacttcgattataatctctttataatctccagcgacccccaaatgtgtattttcagcccagtcttgtctgctcagctccaggctggctgacatttctctcagacccctttttaggagtagcccttattacatgccaggcactattctaggcactggagacatagcagaaagggagatttttagaaaatccctgagtttacctgctgtataggaggagacaggcaaagaataaacatatagaaatttatgcggctatagtgagcagataaaacagaagaggccattgggtgggttgcagcatcccatagagttgctggagaagacatcactctgttagagtcaagatctgaaggagacctgagtggctgcctggagatgagagaaaaaacagggggccagggcaggtcgggcctggactgcagtcttggcgaggactggggctttttctctacgggagagggcagccatgggagcatttagagcagaggaggcgtggtggtgggcacctgtagtcccagctacttgggaggctgaggcaggagaatggcttgaacccaggatacggaggttgcagtgagccaagatcgcaccactgtactctagcctgggtgagagagcgagactccatctcaaaaaaaaaaaaaaaaaaaaaaaagttccacagacaggctgggagttgaggcagatcccctaacatctctgtgccttcgttttcacatctgcagaatgggaccagtagcacacgttgagcagccttaatccaaaatactccaaaattcaaaagtttttgagtgtcaacatgacacttaaggaaatgctcattggagcattccagatttcaaatttttagattagggatgctcaaccagtgaatagaatacagatgttcctaaagctaaaacaggtctggttcctagcatttctggaaagggatatttaacctgtagtagccgtcttacctcctatcagagttttggagatggtaatttgggaaaatatgttgctttgaaaagtaaagaaaggttacagaggtggggtgtgtcccaggacaggtgacaaccgttatgatggcagtgacaattcaggatggcacctcaaagacagccgtagacactgggctgacacttggaactggaccacctgagcagaggggctgaggtctctcagacccagagatttggggaaagttgtttctcacatcagaacaggacatttccatgtatccctgcctttctcaggggccagaggaatctcataagaacatgactcagattaccttcttttatttatttatttatttgagatggagccttgctctgtcgcctaggctggagtgcagtggcgtgatctctgctcactgcaacctccacctcccgggttcaagcagttctcgtgcctcagcctcctgtgtagctgggattataggtgcatgccatcacacctggctagtttttgtattttttgtagagacgggattttgccatgttggccaggctggtccccaactcctggcctcaggtgattttcccaaagtgctgggattgcaggcgtgcgccaccgcgcccggccccaccgtacactcttaggagaacatcaggctgggtgcagtggctcacgcctgtaatcccaacactttgggaggctgaggcgggtggctcacttgggggtcaggagttcgagaccgcctggctaagatggtaaaaccccgtctctactaaaaatacaaaaattagctggggcgtggtggtacatgcctgtaatcccagctacttgggaggctgaggcgggagaattgctggaacctgggaggcggaggttgaagtgagctgagattgcgccactgcactctagtctgggggacaaagtgagacaccgtctcaaaaaaacaaaaagagaaaatcatagtattttttggggggttttcttttttttgagatggagtctcaccctgtcgcccaggctggagtgcagtggcaagatctcggctcactgcaacctccacctcccagtttcaagagattctcctgtctcagcctcccaaatagctgggattgcaggcacccaccaccacacctggctaatttttgtatttttagtagagacagggtttcgccacataggccaggctggtctcgaactcctgacctcaagtgagccacctgcctcagcctcccaaagtgctgggattacaggcatgagcccctgcgccaagccttgagaacatcatagtattgttatgaaaatagatttgagctcacagatccccctgttcctgtgtgcagactcaggaggcccccatgcaagtcagggggcttgtgggaggcgggaccagagctacctcaaggagaatggggacttaataactgtgctctctcagacaaggacacgttgaagggagttgatgcaagcaacgcgctcgttctaccggggaagaagaaaaagaagaccaaagcccctcccctgtcgaagaaggagaagaagcctctgaccaagaaggagaagaaagtgctgcagaaaatcttagaacagaaggagaaaaagagccaggtacaccccactcgggcagggtctgcaagtggctctccagcatagagagagatggggggtctctctcctcctgagggtgtctctgtggtgcaactaatagaactttctggaatgaggaaaattccagtgcatggtccagtgcggtagccactaaccacatattgctgttgagcacttgaaatgcagctactatggcagaggaactgaactgaactgttccggagaatgtcaaacttttttccttgttttttcttctttttttttttttaatttaaatttaatttttttttcttttttgttttgttcccccacccccgacatcttttctggctctaccaaaccttaaaaaaattttttttttttgagatggagtcttgctctgttgcccaggctggagtgcagtgaaatgatcttgggttctcctggtatcaagtgattctcctgcctcagcctcctgtgtagctgggattacaggcgcgtgccaccacgtcaggctattttttttttttttttttgtatttttagtagaggcggggtttcatcatgttagccaggatgatcttgatatcctgacctcgtgatccgcccgcctcggcctcccaaagtgctgggattacaggcgtgaaccaccatgcccagccaaccttaattttttcatagaggaaaaaagtttgtcatgggaaattcaaacatttgcaagggaaattcaaacatttgcaagagtaaagagaacagtatgatgaactcccatgtgcccatcgccagctccaacattgatcagcccctggtcaatcttggattatctccactgctggtcactttcccacctctgggtcattttgaagcaaatcccacatacagtgaatctgtactagtttcctggggatgtcatacaaatgaccacaaactgaggggcttaggacaatagaaatttgttccttcccagcttaggaggccagaagtccgagatcaaggtattggcagggcggtgctcctcactgggctcaggggagggtcattcctggcctcttcctgctcctggcggctccaggcgttcccttggcttgtggctgcgtcactccaatctctgcctccctcttccctcggcctttcctccgtgtgtctcttcgaagggcgcttctcattggatttaggtcgcgctcagatactcaggatcatctcatcttgagatccttcacgtaattacgtaattacatctacaaaacctttttccaaatagggtcacgttcgcaagttctgggatacgaacacgtctttgagggaggctgccatttaacccactatacatagcattatatccataaatatttcaatttgtatctctataagtagagacttttaaaaatgaccagaataccattagcacacctaatcttttattttaatatcaaacatctagcaagtggttaaatttcctgttgtttcatggatactcctcacccttttcttgtttttttttcccattgtagtttatttgttgtttgtcttacagtttcctaccttctggatttttaaatttttattttattttattattttttgagatggagttttgctcttgttgcccaggctggagtgcaatggcatgatctcggcgcaccgcaacctccacctcccgggttcaagtgattctcctgcctcagcctcccgagtagctgggattacaggcatgcaccaccacgtccggctaactttgttatttttaatagagacagggtttctccatgttggtcaggctggtcttgaactcccaacctgaagtgacccacctgcctcggcctccccgagtgcagggattataggcgtgagccactgcgcccagccttaaaattttattttaaacatgctcctctgccatctgagctttttgtacattagtatttggatctgtagcagtgactgtcatccggaacagttttgcgcgccgccccccgctgccccagggacatttggcagtgtcttgagacattttgggctgtgacaacttgggagtgctgctggcatctggcgggtggagccatgggatgctgttaacagcctataatgcacagaaaaacaaaaacttatttggccctaaatgtcaatagtgctgagattgaggaaccctgacctggagccttcatgagaatcaagtttgacttttggtgaggccactgcacgtgggagctgtgtcttcacatcaggaggcttgagggtctctctccagcagccgtggatgggcagtccccagagccttggtagggggaagacttactcacctgtgagcgtgttctttttttttttttttttggagacaaggtcttgctctgttgcccaggctggagtgcagtggtatgatctcagctcactgcaacctctgcctcccaggttcaagccattgtcctgcctcagcctcccgggtagctggtaccacaagcatgcgccaccatgcccggctaatttttgtatttttagtagagacatggtttcaccatgttggttaggttggtcttgaactcctgacctcaggtgatccacccgcctcggcctcctaaagtgctgagattgcaggcgtgagccactgtgcctggtcagtgtgtcctttttaaatcctatttagggtgctttcccgctgtgctataccttgttctgtgtgtgtgtgtgtgtgtgtgtgtgtaatacacacatagaagtgtgtaggctgggcgcggtggctcacgcttgtaatcccagaactttgggaggccgaggcgggcagatcatgaggtcaggagatcgagaccacggtgaaaccccgtctctactaaaaatacaaaaaattagccaggcatggtggcgggcgcctgtagtcccagctacttggagaggctgaggcaggagaatggcgtgaacccaggaggcagagcttgcagtgagccaagatcgcaccactgcactccagcctgggtgacagagcgacactctgtctcaaaagaagtgtgtataaaacctatatgtacagttacaagaacaataaagtaaaaactcacgaaaccctcacccaactaaaagaagccaactgggtacaccccctgcacacagcattgctcagggtagctcggggaccaattcacatcagacacacaaagccgcctccttcctcagagcagctagggagcactgctgtacatgactgaactgtgctttattcatctcctgttgatggacatctggtgggccataatcttctactgtgataccctgctgcagagaacctcatttatacaaccccagattctgtaaaaggggttaaaaaagccagcttgctgtgtctgttgatggaagaacaccatgcaccagtagaattgcaatttgaccgccgattttaaagactccaggtgttaatgatgctgaaattttattacagtctcacttcccttcttaagagagggtcgtgatggcaaatgcataatacactcgtttcctttcccagcgagcagagatgctacagaagctgagtgaagtccaggcttccgaagctgagatgagactcttttataccacttccaagctaggcactgggaaccgcatgtatcacaccaaagagtgagttggccagtcctttgctaaccctgccctccctccagggccccctagggagggcgcacaggttatggggtcctctgggggtggaacatttgagaaaatacctttatggtggcctgagtggctgaaaattcattgtcatcctaaatgcctctagtgggtaaaggccacagatgctgctgaaccttctgcgacacacaggacagcaaagtttctcgctccagtgatgtcggtgttttcctgtggtgtagagtcccttgttacagctcttccagcttttgtgcagctgattaggccagaaattgccattaggtggtcaagggctggatttggcccatcagcgggtttggtttggtttgtgtcgtgtttttttttgttttttttttttgagacagagtcttgctttgtcacccaggctggagtgcaatggcgtgatctcagcttaccgcaacctccacctcccaggttcaagcgattctcctgcctcagcctcccaagtagctgggattacaggcatgcaccaccaagcccggctaattttgtatttttagtagagacggggtttctccatgttggtcaggctggtctcgaactcccaaccttgggtgatctgcccgcctcggcctcccaaagtgctgggattacaggcgtgagccaccgcgcccgactggtttgtgtcgttttttaaggcatgagtgctgtttgccaatatgttagcttcctggcgctgccataacaaattactgcaaacagcggtggcttagaacaaccaagccagaagggtgccgtggctcatacctgtaatcctagcactttgggaggccgaggcgggtggatcacctgaggtcaggagtttgagactagcatggccaacatggtgaaaccctgtctccactaaaaatacaaaaattagctgggcatggtggctcatgcctgtggtctcagctactctggcggctgaggtgggaggatcacctgagcctgggaggttgaagctacagtgagccgtgattgcaccactgcactccgtcctgggcgacaaggtgaattcatgttcccacctagtctcgactagttggacgatccggccacaccagcagtgtccccaccaagctgctgacccttaaatggcctgtgtgcccctcccacccagtcccaccccactctgtggtctcctcagcctgtgctgctcatttacatgaggcctgactggtgcctgtgagcactgtcagttagtgactgtttatcgagtgcagagactgtcccaggctctctgctaggccctggggatagagcagtgcacagaaataaagtcctttctcttaaggagcttcccagtgtcatggcgggagatgtaatcgtgggaagtcatcaggcgagtgcatctgtgtcccacgctgggaagcactgagcagaaaatgaagcagggaagagcgaggtggagggagaagggtgagatgtggggtctgtgtgtggtcagggagtctccctgacagctagtgcttaagcagaggcttaagtggagtgagaggaggtatctgcaggaagggcatttcagggagtggaacagcaggtgcaaagtccctgaggcagaaaggggtatggccttggagtcctgacctctgggattgaggtggggcctctgtgcctgaagtctctgctatctcaacaggaaggctgacgaggtggtagccccgggccaggagaagatcagtagcctcagcggtgcccaccggaagcgtcgccgctggccctcagctgaggaggaggaggaggaggaggaggagtcggaatcggagctggaggaggagtcggagctggacgaggacccagctgctgagccggctgaggctggtgtggggaccaccgtggcacctctgccgccagctccagcacccagcagtcagcccgtgccggctgggatgactgttcctcctcctccagctgcagccccaccactgcccagggccctggctaagcccgccgtcttcatccccgtgaaccgctccccggaaatgcaggttcgccaccccgtgtttgtgattaagaatctaggttagcgggcaaggggcgcacagagggcgtcctggtgaagtggggcaagggcatcccttctctgtgcctccatgtccccatctgggaaaggggagagtgactgcgcctcccttgaggctgtggcagggattggtgcgcgaggaggatcacagtgcagggcgggtgtctggcggcacgcctggcaggctcggggccctggaggtcggcggcagtagcttcatcgccactgccctctgaccagcgggcctggcctgggctgccccgatccagacaagagtttgggctgtgaatcagttgacccgaaatcaagtgctgattcccctgctctccagctcacttcccgcgcatctgtaaaatgggaatattccggctactgaaggggctccccctctctgtgcctgtttccttcctggtacaatgagtgtctcactgggttgtgatgacaatgaaaggatttggggcatggaaagcccacagcccacgtaggaactctggatccctagaggagtaatgttggccgttgaatggaattgggatcctgcttctaagtacatttttctgcttttataagtcttcatcagggtaagctgaccgctctagcaaatgaccccaaagtgccagtggcttcacaccacaaacgtttgcttctaggtgatgtcatcacccagtgccatctggtggcaaggagggtgtggggttctgctccgcgcggtcactcaggggcttggcctcctccatcccgtgtccctgccatcccttgggacttcagttcctgcttttctttgtgaatttttccctattcgtatcctgtccatattcctaagcaatacataccgtaggtttgcctgtatttaaaagtggcatcatgtcctttacgttattccagtttgcttttttgttactcagcattatatcttgggatacatccatgttgatgcaggcagctgaggctcatttactttttccccactgctatcgagtattcacggtgtgaatatagcgcaggatgagtattctgttgctggatagttggttgttttagctttttgctgttatcttcactgctgtttttgttgtttgttcgtttgaaacagggtctcactctgtcacccaggctaaagtgcagaggtttgatctcagctgactgcaacctccgcctccgaggctcaagtgaccctcctgcctcaccctcccaaagagcctgggactgtgggcacacgctactacgcttggctaactttgtattttttttgtagagacggggttttgccatgttgcccaggctggtcttgaactcccaagctcaggcaactcccaaactcaggcaatctgcccactttggcctcctaaagtgctgggattacaggcatgagcacatgactagccttcactgcttttttaaacgttcttgtccctctcctatgagcgcatgtgcagaagtttctcttgggcagtgtttgcaaatgacgtgatagccatctttgggtcatgaattgagtagcttttaatcttttttttttttttgagacagtgtcttgttctgttacccaggctggagtgcagtggtgtgatcacagttcactgcagcctctacctcctgggctcaagcggtcctcccacctcagcctcctgagtagctggcactacagatatgtgccaccatgcctggctaacttttttatttttatttttttgtagagacagagtctggctatgttgcccaggctggtcttgaattcctgacctcaagcagtcctctgccttggcctctcaagtcgctgggattacaggcgtgagccatcatgcctggcctcatatttttaaaaaaaacaaatggaggccaggcacgatggctcacgcctgtaatcccaacactttgggaggccgaggcgggtggatcacctgaggtcaggagtttgacaccagcctggccaacgtggtgaaaccccgtctctactgaaaatacaaaaattagccaggcatggtggtgggtgcctgtaatcccagctactcaggaggctgaggcaggagaatcacttgaacccaggaggtggaggttgcagtgagccaagatcacactattgcactccagcctggacaacaagagtgaaactctgtctcaaaaagtaaataaatacaacaagtggaatagaatagaatagaaatagaacaaaaattaagaatatgagcttgttggccaggcatggtggctcatgcctgtaatcccagcactttgggaggccgaggtgggcagatcacctgaggtcaggagttcaagaccagcctggccaacctggtgaaaccacatttccactaaaaatacaaaaattagctgggcgtggtggcatgtgcctgtaatcccagctactcaggaggctgaggcgggagaatcgcttgaacccgggaggcagaggttgcagtgagccgagatcgcgccattgcatacaccttagggtgagccatgtttcacagaactgttccttccatatacgatacatatatgtgcctgtgtgtgtactgagtcatgatataaaatgtgtttctttccatgagtcacaggaaaaaatgtagaaagcccctgctctggaatatgtacctaggagaggaactgcagggccacacatcttaactttgagaaaatttgcaccagattatttatcgaagtggctgggccgttaattgagactcctgccagcaacagccgagggttcccgtatctctgagagactgctctgccccaaccaagctgtgcctggggatgtcagtcctggtgtcctgaaggatgtgatccctgtctctgtctctcctggaccatggctcctggtcccctccccagctgtcagggcctctgttccccagcaggcacatctgttcagcacccatgtgtcagctgccaccttcctggaggtcccatcactgtctatagtcttgctgctccctaagtgctgacttcctctccttccaggaggaacggctgaagctcccaattctctccgaagaacaagtaatcatggaggctgtggccgagcaccccatcgtcatcgtgtgtggtgagaccggcagcgggaagaccacacaggtgcctcagtttctctatgaagcaggcttcagcaggtaggggctggacacagggttctctctgggtccctcagtgacactggagatgccctgaaaggtcgataagagcctgggctccccaggatccaatcctggatctgccctgtgcatgctgtgtgacttcagacaagctacttaacctctctgggccccagctgtgagatgggaataatagcgcctacttcacaaggttgtcgtgtggattaagtgagtgaacttgcgtagcacacttaattcctggcacgtagagctatgtgcttactattttcttttttccttttttttttttttttgagacagcgtctcgctgtgtcaccccggctggagtacagtggtgtgatattggctcactgcaactccgcctcccgggttcaagtgattctcctgcctcagcctcctcaacagctgggattacaggcgcccgccaccacacccagctaatttttgtatttttagtagagacagggtttcttttttttttcttttttctttttattattattatttttgagacggagcctcactctgttgcccaggctggagtgtagtggcgcgatctcggctcactgcaagctgcgcctcccgggttcacgccattctcctgcctcagcctcccaagtagctgggactacaggcgcccaccaccacgcccagctaatttttttgtatttttagtagagacggggtttcaccatgttagccgggatggtctcgatctcctgacctcgtgatccgcctgcctcggcctcccaaagtgctgggattacaggcatgagccactgcacccggccaagagacagagtttcaccgtgttggtcaggctggtcttgaactcctgacctcatgtgatccacccacctcgacctcccaaagtgctgggattacaggcgtgagccaccccgcccagcctgcgcttaccattttcactgtgtagcctgctattggcacttttgacccatgtgtgttggggtccccaagaccatgctcaggttcggtgattgaccggggactcccaggactcagcatgttatcctgcacatggctatggtatattacagcgaaggacgcgatcagcagagggcagtggtacctggggtgttctggggaaacccagctccagcttccagagtcccctcccggtggactcacacaggacgcactggattctccagtagccacctgtggccacacaggaactatcctccaccagggaagctagttagagattcagggtccacggctgttactggggtcgcctaagcccaccctgcctggcaggaacgaaatcctagacgcctaaaaggaaagcaggtgtccggcataaaccaccctgtttgcacaaacaggctgggcacagtgggccccgcacttacagggaatggaaggagctctcctgttgtacaggttcaggcacccagcgagggccagccccgtcagcagcctttcgagggagagcagctgcaggtctgtggtgttaatgttcccacagagctgggaccagccacccatcggcttggcgggttcctgtgtctggaggagcttgtgcttgactggggcaaacagagctcccagcctggttcccccaggccccgttccttctagcggctgcctggtgtccgctgcatggtgaatgtcgaaccgttttctatgtgttggcctttgggctgttccgtttgctgttaaaagtagtgcaacctggcactgtttcccaccgcccctgggtgagcgccaggtcagtatggcaaatcttgctgtggaactgcatgaggctttggcatgaacaggtggggccgcgcactgttgatggccatgttcttcctcccccagtgaagacagcatcatcggtgtcacggagccccgccgagtggccgccgtggccatgtcccagcgagtggccaaggagatgaatctgtcccagcggtgagggctctacttccctggggcggactatggggtggtcctgtggccttgcccagatgtgggaagcccaggaggaggtgagcagcatctgtgccgagggtgctgggtggagtgtcacctctgcatgtagcactgggaatcattgtgtgagagaactttccaggacctgcccaagcagggggcctccaagcaagcttacgtcctgcacagtgtgccgaggggacagagtggcccatccaggggctcgagaacagagcagggggccagatgcaggcagtcacggagctagtacctagcattgccgggttaatctaaaactcaaggttctaaagtacaaaatcttggccgggtgtggtggctcacgcctgtaattccagcgctttgggaggccaaggcgggcagatcacctgaggtctggaattcgagaccaacctgaccaacatggagaaaccctgtctctactaaaaatacaagatgagccaggtgtggtggcacatgcctgtaatcccagctactcgggaggttaaggcaggagaatcacttgaacccgggaggcagaggttgccgtaagccaagatcgcaccattgcactccagcatgggcaacaagagtgaaactctgtctcaaaaaaaaaaaaaaatcttcaggcggtaagtctgtaggacttgctttggaaagcagccttgaacaggcagatatagcacttgctttacaatggctgggagcatatgtttataatgcagaggcctgtgtctaacatgtccagcatggtctaaaatccagaaggcacaaaagagcacagagtgagagcctgcctcatctgcccactcagcagatgttactaggcagcatctagtgtgccaggcccatcctgggctctcaggacgtggtggtggaccagacagagccaccggcccccgggtcagcatgccagttgggggacttgttgtctttgtacgttaggctcggaggacgctaaggcagggatggagtactgggggccccttctcacccaatgccctgcctcctctccaggagcagccaccactgaccatctcctgcacgtcctcctggacaattctgtgcatagttggcatgcgtctaggaaaagctgcctcattctctttttaacttgttaaatattataaaaatttggggactgggtggccgggtgcggtggctcacgcctgtaatcccagcactttgggaggccgaggcaggtggatcatgaggtcaggagatcgagaccatcctggctaacacggtgaaaccccatctcttgaaaaaaatacaaaaaattagccgtgcgcagtggcgggtgcctgtaatgccagctactcgggaggctgaggcaggagaatggcgtgaacccaggaggcagagcttgcagtgagccgagattgagatagcaccactgcagtctggcctgggcgaaagagcgagactccgtctcagaaaaaaaaaaaaaaatttggggactgggcacggcggctcacgcctgtaatcccaggactttgggaggccgaggcaggtggatcaccagaggttgggagtttgtgactagcctgacaaacatgaagaaaacccatctctactaaaaatacaaaaaaattagctgggtgtggtggcacatgcctgtaatccagctattcaggaggctgaggcagaagaatcccttgaacccgagaggcggaggttgccatgagccgagatcacgccattgcacttcagcctgggcaacaagagtgagactccatctcaaaaaaaaaaaaaaaaaaaagcgttggggggggcgcatatacataagtagaaaggatagtataatgagcccccaggtacccaagacccagttgtaataattgtcaactcttgccctagcctgttggatctgtactctcctcctggcccccctcccccccactgtttagaagcaaatcttaggtatcttattttatcctcaatattttgctgtacagatctgagagataagaactaattttttttttttcttttttgagacggagtttcactttgtcacccaggctggagttcagtggtgcgatcttggctcactgcaacctttgcctcctgggttcaaacgattctcctgcctcagcctcccgaatagctggaattgcaggtgcccggctaatttttgtatttagtagagatggggtttcaccatgttggccaggctggtcttgaactcctcacctcaggtgatccacccacctcggcctcccaaagtgttgggattacaggcgtgagccattttttgttttttgagatggctctattgcccaggctggagtgcagtggtgccatctttgctcagtgcagcctcaacctcttgggcacaagtaattctcccacctcagcctcctgagtagctgggactacaggtgcacaccaccacaccagattaatttttgaattaagataaggactttttgtgaaacacatacagctgcagtaccccgatgatagttgccaagtctgtgaagtctctggaacacactccagcccatgtgcaggtctccccggtgtctcctggcatagtcaccatccgaggagggctctggccgaggtgttcagggcctggctcctcagttgcccttaacagctccttcccttcccttcagaaaccaggattttggagggggagagtggactggggagatgtctgggacttgtttcaggttgccagcgggccctgccctcaagccgcctgcctgctccacggcctgccttgtagtggccccgtggcgacagccccagccaggcacggctctgccctaacccgaactctgcccatacagggtcgtctcctaccagatccggtatgaaggaaacgtgacagaggagaccagaatcaagttcatgacggatggtgtgctgcttaaagaaatccagaaggttggttgtggatcctggctcacagagcaaggccagtgggcatgggggcgggatgctaggatgtcacctgggatatgagcagccggcaagccacctgttgatccagcactcccacggtgctgctgtgtgactttgggtgagttacttaacctctccaagctcagtttcttgatgagtatgttggtgcattccttagagaatcattttgaagcggaagttgtagagtgcatgctgacagcttagcacagtggcccgtacctagaaggtgctcgtgaaatgtgaacttgtatttttattgtgactgactcacagagttcacgccttgccgggggtgtactgaaagcctgtggtgtgcaggctctgccctgcggcgggtccagacacagccccctcttgggagcttcgagtccagttgcgtttggtgaggggcagcaccagactcggagtggggtaccagcctcaggctgagggaaaggggaggggccgctggggcttgcccttgagcgtcttcacggtccctggcctcagaagctgcgtcccaaggactttccatttgtaaatcggaaccccagctgctgcctccctagtcagcccacttgggccttggggaagcaccccatgcttcctagggagccggccattcggtcaagtgggtggcacgcgtgtccagagagcatgcagggcccgggtgggggactgctgtctggtgaagaagctgtgctccgtgctggctgtgacgtccccttgggcagggccaatctcccagggggatggcaaaggtgattccagccctcctggctttgaagccactgggactcctgggggtggcagtggatgcagtttgggtctgggtggcccctgtctgtgtggcacctgctgtccaactgcccacggccccaccccacatctcatgtccatttcccacctgccctcccactctgcgggcatctgagttgagcagctcacctctgatgaagagcagctgcccttcctctaacactgtctcctcaagtgggagttctgggacgtgaagcggcccttggggcttaggctggaagggtgggcctcaccccggacctccccccaggacttcctgctgctgcggtacaaggtggtgatcatcgacgaggcccacgagaggagcgtgtacacggacatcctcatcggcctcctgtcccgcattgtgactctccgggctaaggtagcgcaggaggcgggtgctggggagccccgagccctaggccccccccagctctgtcagaggcttgggcttccttcacctgttccccgttgtaccctgggctgctgccatgagcaggtaccccgagcacaaggtctccctgggcctaggtctaggcctagtgccagggctgtgaatcttggaacagcccctgtgtgatcccctccccaccgccccggtgccagcctcataaactggtgtccttctccccatccaaagcaagaggctcaggagaagtgttgatgccttgccaggcgcaatggggctggttgatgaggcctctgggcctctgggatcagcagagcaggtgggcctgcccagccaagggccaggctcccggagctctgagaggggctccccagggcctctttctccatctccctgccccagcctgacacaggggcctgctgagttggtgggtgccaccctggggcgcggcttcatgcagtaggcctgtctcaccctcccggcggggagaggggcctgcgctccacatgtgccatgagcctggccacattcaaggccctgaaaatcaacagtgaacaagacgctgtcttgttctaacagttcctgccctcctggggcctccacttcagcaagggtggcaggcaggacgcagactcagagtatgtgagccagtgacagacaaagccgggggcagtggagggaggacacagggctagtgagggcttcacccgaaaagtgacctctgagctcaagtggaaggctgaatgagggagggagtgagcggcgtgcattgcagagcgaggagaagtctgactggaggagagcaatgcaaaggtcctgaggcgggcgtctgcctggtgccttttttcttttggtaacaagctttattgggctgtgattcacatttcatatcattcatctgttcaaatgtacaattcagtggtttttagtccgttcacagagtgtgcagccatcaccacagttttatattttgtcactcatcaatccaacaagaaaccctaggccgggcacggtggctcacgcctgtaatcccagcactgtgggatgctgaggcgggtggatcacttgaggtcaggagttcaagaccagcctggccaacatggtgaaaccctgtctctactaaaaaaacgaaaaattagccaggcctggtggcgcacacctgtaatctcaactactcgggaggctgaggcaggagaatcacttgaacccagcgggtggagcttgcagtgagccgcgatcgcgccactgcactccagcctgggtgagaaagcgagacttcatctgaaaaacaaaaacaaaaagaaacgctgtgccttttatggttttttgtggtggtggtttttgtttttttttttcgaggcagggtctcattgtcactgaggctggagtgcagcggtgcaatcacagctcactgcaaccccgaccttctgggcttaaggaatccttttgcctcagcctcccaagaagctggaccatggtcactctgtgtgtaaccatttgcaaatgatttcccccagcggctgcagaattccatggtacttccgcaccagcagtgtcagagcttccagtttctccacatcctgccagcacttgtcgttttccatttctgttattctagacatccctgtgggtggacagtgacacctcactgtggccttggtttatgtctttgggggccatcaggaagtctagagtggccaagcagagagggtgaggtggggtccggaaggcacgggggtgaggcagacagggacggtcactgtggggcaagagaggggcctgtgctgggtgtcctgcctcccacagaggtgctttggccactccttagcttctgggtttggggtttcgtagcagcaaaggcagcaagagcttgaagcagagctcaccatgaggccattaggcattgctgagcggcctggggaccagggagctcccgggagctctctcccaccccccacagaccccagagaatcaggcagctcttccctgagcccccggcacagacactcagtcaatcttggtgtcaggtgggagctgggttgggtgggccccagtctcagcccacctgcctcatattctaccatcaaagcctgactctgaaagaccccctggaacaagccaccgccctgggagcggcaggtcccactattgactcactttctccaaggagcctttggcatccagaaaggggcagagggtgggggctggaaacggggtgggcagcagggcacccccatgccgatttcccaggcttcagacccacctgcggtcctggggccacggtcactgagcctgtccttttgcagaggaacctgccactcaagctgctcatcatgtcggccacgctgcgggtggaggacttcacccagaacccacggctcttcgccaagccgccgccggtcatcaaggtaacacagggtcccatgtcctctgtgagcttggatggcacaaggacgccctggtgtcgggagccccctgagagacctcacttggtcacaggggggattgacagcagcttggagggggtgttagaaaccttgattcggaataatggggaaagggaaggcagccctgggccgaagctcgtgtcccccccactccccatgccttcctgggcgtcccacaggtggaatccaggcagttcccagtgactgtgcatttcaacaagcggacaccgctggaagactacagtggcgagtgcttccggaaggtctgcaagatccaccggatgctgcccgcaggtgaggccctggccaggtcaggggaaagaagcctcccttcctaaaccctcgctgaaagcacgagtgtgggagggcccatctccgagtggctcagaaaagtcccttgaccctgccaggcctcggcttcctcacttattccagagtgttcatgacacctgtctggccttattccactccaaatactatgaggcttcagcagctaccagatggtggagcttgccatctgtccccatctgataagcagaaaaacccacagggcccaggccagtgctggcaggtgaccatagacactgtaggggaacgggcacatccccccaagagtcacggatacccttcacagttctgccttgtccccatcatacctgctccgttacccacctcatgttactgaaatggatgtgacctttctgtgtgaatagattgtgatcgcttccagccagactttttttttttgagacggagttttactcttgttgcccaggctggagtgcagtggcagatcttggctcactgcaacctccacctcccgggttcaagtgattctcctgcctcagcctcccaagtagctgggattacaggtcccacactggtcgcacactgccacgcctggctaattttttgtattttagtagagatggggtttcatcatgttggccgggctggtctcgaactcctgacctcaggtgagctgcctgcctcagcctcccaaagtgctggaattacaagtgtgagccactgcacccagcctagccagagactcttgtgtgccgaatttgggcccaaggctggctttcttcatgttagggaggcaaggagccatgggggtgcttcccaacaagcttgacctcgtccttcaaggaagccgaggttgctgcttcgtgatgctctgtccttgctctgcttatggcctttcggggctcccatccattctctgggagactggggctggcaggaggtgaggctggagcttgggcagtgagccttcctgcagcctcaggtctcagggcagccgcggcgctgtcactgtcgtgagtgtggtgtgcagggttccgtgtgagcacgcttctcagggcttttgggtctgttcctgggagtgatgctgctgggctgtgcagtcgccgtgtttgttgaactccctggcggcagctgcttcagtctgggcgtgctgccccctgctcatctatgtctgtgtactcctgtcctcccccattatccctggaaccttgcctctcagagcatggcttggcaggtgcttttgctaagcaaatgtttgtgagtgactgatggataacagaggggcccattctttccacaggtggcatcctggtgttcctgacggggcaggctgaggtgcatgcgctgtgccgcaggctcaggaaggctttcccaccctccagagcccggccacaaggtaaagaggacgccccgaccagcactctgccctgagcagctgggcttggcctcgcgctccctggctggggtgcagctcctgcctctgagcttctctctggaagcatcagcacctttgccatcccccacctcacccccgaataaatggccaccactgagtggccatgccttgaacaacaaagggcagtgtgctggcgaccacgccggccacagacgcctttctccccaacctgcccctctcccagaaaaggacgacgatcagaaagactcggtggaggaaatgcggaagtttaagaagtcaagggccagggccaagaaggcgcgggctgaggtacgtggggggctggcagggactcctggagagtaaggctgcgttgtccaggatggcagctaccagccccatgtggctgcttaggtttaagtgtaattggaataaaatgaagttaaaaatccagttcctggtcaggcacagtggctcatgcctgtaattccagcactttgggaggccaaggtgggaggatcgcttgaggcctagagtttgagaccagcttgggcaacatggtgagaccatgtctctacaaaaaattttttagattaatccagtgcagtggcgcatgcctgtggtcccagctgctcagaggctgaggtgggagaaccatctgagcccaggaggtcaaggctgcaatgagctgtgatggtcccactgcactctagcctgggcaacagagtgagactctgtctcagaaatggaaaagaaggccaggcgtggtggctacgcctgtaatcccagcactttgggagactgaggcaggtggatcacctgaggtcaggagttcaagtccaacctgaccaacatggcgaaaccctgtctctactaaaaatacaaaattagccaggcatggtggtgtgcacctgtactcccagctactctgggatggctgggctggcaggggctttcctctagcctctgcgtgaaggcaccgtgggtcttgtgctccgtgacggtagcgtaagcactcagccgtctctgacttgcctgttgcactaccgatgtgtcaggcagcgatccaggttcctcacgtgtgttcacacaaccctcccaccagcctgggagacaaggtctatgatagtccccaatgtttaggtggggaaattctggcaggaagagagaattatgtggcctgccccgggttgcatggcccatgggtgtggaccggggcttccatgcgagggcacctgtcttcctgcacgtgccacgtcctcacacccaggatccctgcagcccaggtgtctatgtcttgttcgccgtaggtgctgccccagatcaacttggatcattactcggtgttaccggcaggcgaaggcgatgaggacagggaggcagaagtggatgaggaagagggggccctggactccgacctcgatctggacctgggggatggcgggcaagatggaggtgtggcccgagcaccgattcctgctcatgttcattatctctgccctgaggatgtgcccagagcccttgtgggccccccgggggccggggttctagcagctttgtccccgatgcttcctgagttcttgaaactgcctggcacgaggaggcctcaaacatttgccatgttgaatgtaatgggggctgccaaccccttgctgagggacgcaggccttcagagcctgggggtgttgcccagctccgtgtgctcgcaggggccccctgaatgcaggcagacccagtgccctgctgtgcccagccaggggctgagtggggcagcagagagtaccccagtacgggctcagcctgaccccaccacaatgctgccaggacacgaggagtggagtcaggctcccgggatccatgccaggggtttggaggaggagattgtgcagcacaggggttcagatccggttcagggcagcagagacaagagagcccctgggaacctctcagcagttcccccaggcttggcctggctggtcccaaggggagcctctgcagcagggcaaagaaaggagctctggtggagcagcctgggggtgcagggccgctgtggccagctcctgcctgtgggcatctgtcccggcctgggtgccagtgacctctgctttccctccaggtgagcagccggatgcctccctcccgctccacgtgctcccgctgtactctctgctggccccagagaagcaagcacaggtaaccgtgctgggccggtgcccagcttttggggcacttttaagggcattacagtggggttggtcaagcccttggtggtcctctccatctgctgtttgatcagcatccccagagttttgaggaatattggggtagttttggagaatagggaaccctcccccaaggcactgggccccagatgggatggcttgtccttgctacgtctccagcacaccagcctggctggctttgtccttgagcctccattccacgatttcttttctgattctggtgttttcctgccatcccttccccgaatcctaggtctttaagcctccaccggaggggactcggttgtgtgttgtggccaccaatgtggccgagacgtcgcttaccatccctggcatcaagtacgtggtggactgtgggaaggtcaagaaacgctactacgaccgcgtcactggcgtatcctccttccgtgtcacctgggtctcccaggcatcagctgaccagcgagcgggcagagcaggacggacggagcccggccactgctacaggtgggtcacccaggctcctcctcagggacgttggtgccgccttgcaatagccactgaggaacaagggaaggatgctgacccccacctccatctgtagtatgttccgtgtcctgccgggcccctgtgactttggggtgctccccagcccttttgctggctttcagatactcacactattttttttttttttttttttttgagatggagtttcactcttgtcacccaggctggaatgcaatggcgtgatctcgactcactgcaacctccacctcctacgttgaagcaattctcctgccttagcctcccaaatagctgggattactggtgtgcgccaccacgcccagctaatttgtgtatttttattatatgtatttatttattttaatttttgtatttttagtagagacggggtttcagcatgttggccagactggtctcgaactcctgagttcaggtgagccaccatgcctggcctactcgcactgtttcttttttttttttttttttttttttttgagacgagtctcactctgtcgcccaggctggagtgccgtggcgtgatcttggctcactggaagctccacctcccgggttcacgccattctcttgcctcagcctcccgagtagctgggactacaggcacctgccaccacgcccggctaatttttttttttttttttgtatttttagtagagatgggttttcaccgtgttagccaggatggtctcgatctcctgacctcgtgatccacccgcctcggcctcccaaagtgttgggatcacaggcgtgagccaccgtgcccggccactgtttctttattctgctactgaggtcaggggcagctcttgagtgctgtttgttaacagcttgatcaggatataattcacataccataaagtacataattttaaagcatacaatccaggagtttttaggacagtcacagagttgtgcaaccatcaccacaatcaatgtcagaacttcccatcaacccaaaaagaaaccccgtgaccactgcagtcaccccccttcttccccgccccagcctgtggcaagcatcagtccactagtttttgtctatagggatgtgcctgttgtgggcaattcagataaatgcaataaagtcatacaaggtgtggcccctcgtgtctggcctctgccgctcagcacggtgagttttcaaggctcaccccgggtggcaggtgtcagcaccccgttcctggccgtggctgaatgatatcacaccatatggatgtgccgagttttgtttgtctgttcatcagctggtggacgtttggttgttttcacctcttggctattgtggatagtgctgctctgaacactcaggtgcaaggatttgtctggctccggtttcattgctcttgcagtggaacctaagagaaccgctgggccgtatggtaactctgggtttaacttaccgaggagccaccaaactgttttccacagcagctgccccatttgacatgcctaccaacagtgaatgagggtttcagtttcttcacgtcctcaccagcactttttaatttttttttttttgagatggagtctcgctatgtcacccaggctggagtgcagtggtgcaatctcagctcactgcaacctctgcctcctgggttcaagcagttctcctgcctcagcctcccgagtagctggaatgataggcatgcaccaccatgtgcatataatttgtttgtttgtttgtttgttttgtttttgagactgagtctcactgttgtcggcctgggctagaatgcaatggttcaatctcagctcactgcaacctccgcttccaggattccagcaattctcctgcctcagcctcccaagtagctgagattacaggtgcccaccaccacgcccagctaatttttgtatttttagtagagatgggggttcaccatgttgaccgggctggtcttgaactcctgacctcaggtgatccacctgcctcagcctcccaaagtgctgggattgcaggcattagccacggcgcccggccaattcttagatttttagtagagacggggtttcaccatgttggccaggctggtcttgaacacctgcctcagcctcccaaagtgctgggattataggcatgaaccaccacgcctggccagcaccaacacttatttttaatatttttgttttgctggggttttttttgagagacaaagtctcactctgttgctcaggctggagttcagtggcccaagtatagctcactgcagcctccgcctcctgggctcaagcagtcttcgtgcctcagcctcccaagtagctgggagtagaggcacgtggcactgtgcctggcttcaggtgttttttttgttttgttttaatgtgtgactatttcctgtcacacacagccctgccctggtcctgagaacaggtgcccttacctcacccacccccactttttttttaatatgaaagcttcagtatttttgagcctagctctcctagtggatgtgaagtggtatcatattgtggattcggtttatgtttccctaatgactaatgaaggcctcttttcatgtacttattggccctttatgcatctttctagggaactgcctattcagatcttttgctcattttttaattaggttatttgtccttttattattgatctgtaagagttctttaggccaggcgccatggctcacgcctgtaatcccagcactttgggaggatgaggcgggcagatcacaaggtcaggagttcaagaccagcctggccaacatagtgaaaccctgtctctactaaaaatacaaaaattagctgggcatggtggcatgcacttgtaatcccagctacttgggaggctgaggcaggagaatcacttgaacctgggaggcagaggttgcagtgagccaagatcatgcccctgcactccagcttgggcgacagagcgagacttcatctcaaaaacaaaaaaagttctttatataatataatctggatattagatcctaatcaaatgtgtcattgacaaatattttctcctaatccgtgtgctgtaattgtgtgtgtgtgtgcgtgcacgtgtgtatgtaagtgtgtgtgcgtgcgtgcacgcgtgtaagtgtgtgtgcgtgcacgcgtgtatgtgtgtgcgtgcgtgcacgcgtgtatgtgtgtgtgcgtgcgtgtgcgtgcgtgcacacgtgtatgtgtgtgtgtgcgtgcgcgcatgcgcgcgtgtatgtaagtgtgtgtgcgtgcgtgcacgcgtgtatgtaataaatagctttattgctgttccttttgtcagggctacatgttagttaaaaagtagaaaatttagaaaatttacaaagaaaaccagtaagaagtaactgtagttaaagtgtagagtgctatgcaccatcccctgttttaagtactctacatggaataataccttttcttttggttttgagacggagtctcgctctgtcgcccaggctggagtacagtggcaccatctggctcaccccaacctttgcctcctgggttcaagtgattctcctgcctcagcctcccgagtagctgggactacagatgcacgtcaccgtgcctggctaatttttgtatttttagtagagatgggggtttccccatgttggccaggctggtcttgaactcctgacctcaagtgatccacccaccccagccttccaaagtgctgagattacaggtgtgtgccgccacacccagccagtggaataatagctaattaattttcaccaattccttacgaggcagctgcaatttgagctgcatttcacaggtgaggagaatgaggcaggaagcggtaaagcaccgtgcctgctgtcaggtgaagatccagtcccagtggcatgactgagttttgtttgttgtcccggtttctgtctgcccaggctgtattcatctgtggtttttggtgtgagttttgtgtttgttgtcccggtttctctccatccaggctgtattcatctgcggtttttggtgacttcgagcagtttcctcctccagaaatcacccggaggcctgttgaagacttaatccttcaaatgaaggcgctcaacgttgaaaaggtcagttgctgcccccagccccgctctcagccaccccagtggaccacctccctttccctgaggcagggagcccagagctgggtctgctggtgcctggcctgcggcagctgcttacacaacagtgcatcagcaggtgctcccagggcttctgggctcctgtgaccgctgcctccccagtgctgcatcgcccgtggacacccaggggatggctgtctggaatagaggcagcagggtcctgcacgctgttcatgtactatccgtccgtggggcgtgcagaacgtgctgccggctcttcctggctgcagccttctccgacccagtcctccagtggagggggggatccctctagggtcaccctccctccccctgctccagggcaggctaagccaggcagtgccccgtgccacgctgcgtgctgtcctgtgggcgttcagatccccatttaactgatgaggaaacggaggcagggaagtgaaggtttttgtccagggacacacatctagtaagtgacagaacccacatggtctcctagtgccttttaaacatctgtgctcactgatttttctggatgttaatatgttcaaaatcataaaaacttcagatacttgagatcatcagggagaaggtgaagcccgtcccactgtccgccatttgtgacctgtgtcccagttacgtttccaaacacataacatcctgtactttattcctgtggttttgtgaatattgtctgatatgttacacgctgctttgggggcttgattttttcacctaataaaaatcatgggtgctggccgggcctggtggctcacacctgtaatcctagcactttgggaggctgagacatgtggattagttgaggtcaggaatttgagaccagcctggctaacatggcaaaaccccgtctctactaaaaatacaaaaaaaaaaattagccagggaggctgggcgtggtggctcacgcctgtaatctcagcactttggaaggccgaggcaggtggatcacaaagtcaggagttcaagaccagcttggccaacaaggtgaaaccccgtctctagtaaagatacaaaaaattagctgagtgtggtggcacacgcctgtaatcccagctactcaggaggctgaggcaggataatcacttgaacccgggaggcggaggttgcaatgggccgagattgtgccattgcactccagcctgggtgacagggcgagactccgtctccaaaaaaaaaaaaaaaaagccaggtgtggtgacaggtgcctataatcccagctacttgggaggctgaggcaggagaatcactggaacctgggaggcagaggttgcagtgagccaagatcatgccgttgcactccagactgggagacagagcaagactccgtcccaaaaaaaaaaaaaaaaagctgggtgcattggctcacagcactttgggaggccgaggcgggtggatcacaacatcaggagctcgagaccagcctggccaatatggtgaaactccgtctctactaaaaatataaaaattagccaggcgtgatggtgggcacctgtagttccagctactcgggaggctgaggcaggagaattcttgaacccaagaggcagaggttgcagtgagccgagatcacgccgttgcactctagcctgggcgatatagcaagactccatctcacaaaaaaaaagaaaaaaaagaatcatggatgccaagtatgtgctgggcgttcagcacgtgtgacctcaggttatcctcccagccactctaggagggagttactagtgttatcaccccattttccagatgaggagcctgagacactgagacaggcctgactgtgggtcacgtggataaaaagtgtcagggctgggctgggagctcagtgtggctgggagcactgtcgggagtgcctcccacaagtgacatcaagtccactctgtagaaactccgcagtggcttcccctggctcttgagtcagctccagagcaggccccctcctgccttcccccagacctgggttcctagcattgcctccttacctgcgtgcctgctgcaggctcaccaccccgcctctagctttattgagatagagttcaggcaccacacagtcacccattgaaagtgtgtgggtcagtagtttccagtgtgttcacaaagttgtgcggacatcaccaccgtggccattttcatcaccccagaaaggaagcatgtaccctttatctgtcaccacctcccagctccctggcccctgtgcccactcctctccatggatttgccagtttgggacatttcatgcagatggaatcctacaatgcgtggcctttgtgcccggcgtctttccctgagtatgatgttctcaagctccatccgtggtgtagcgcgtgtcgctgcttcactcctattcgcggctgaatcattgtccattttatgggtggcccacgttttgttcatgcactcctccattcagagacgcacaggttgcttccatcttttggctattgtgataaatttattcacgttattattactattttgagatggggtctcactctgtcacccaggctggagtacagtggtgtgatctcggctcactgaaacccccacctcccaggttcaaatgattctcctgtctcagcctcccaagtagctgggactacaggcgagcgccaccacacccggctaatttttgtatttttagtagagatgggggtttcaccatattggtcaggctggtctcgaactcctgacctcaggtgatctacccgcctcagcctcccaaagtgctgggattacaggcgtgagccaccgcaccaggccaatttattcgtattatgcctcactgactacctgtggcccctcctggtcaaatgacgctcagtcctcatgagtataatagtctgttaaaaaccgaaaaaagcacccagcgggggcaaagcacagccctcagtgcctagccagtgcttgggacgtgtttttgagtgaatggatgaggtgagtgagtaaaggaggccttggggttccattgggacctggcctttgagagtgccccaggcccctgtgtccccactggcatgagctgagcccggagagaggggttggagggagtgcctgccacagacggagcaggagcaccggacttgttcttggcattcaccctgtccctgccacgtctccttgtgtcccaggtcatcaacttccccttcccgacgcccccctccgtggaagcccttcttgccgccgaggagctg

SEQ ID NO: 592 - protein, 912 aa, Homo sapiens
MPAMPSSGPGDTSSSAAEREEDRKDGEEQEEPRGKEERQEPSTTARKVGRPGRKRKHPPVESGDTPKDPAVISKSPSMAQDSGASELLPNGDLEKRSEPQPEEGSPAGGQKGGAPAEGEGAAETLPEASRAVENGCCTPKEGRGAPAEAGKEQKETNIESMKMEGSRGRLRGGLGWESSLRQRPMPRLTFQAGDPYYISKRKRDEWLARWKREAEKKAKVIAGMNAVEENQGPGESQKVEEASPPAVQQPTDPASPTVATTPEPVGSDAGDKNATKAGDDEPEYEDGRGFGIGELVWGKLRGFSWWPGRIVSWWMTGRSRAAEGTRWVMWFGDGKFSVVCVEKLMPLSSFCSAFHQATYNKQPMYRKAIYEVLQVASSRAGKLFPVCHDSDESDTAKAVEVQNKPMIEWALGGFQPSGPKGLEPPEEEKNPYKEVYTDMWVEPEAAAYAPPPPAKKPRKSTAEKPKVKEIIDERTRERLVYEVRQKCRNIEDICISCGSLNVTLEHPLFVGGMCQNCKNCFLECAYQYDDDGYQSYCTICCGGREVLMCGNNNCCRCFCVECVDLLVGPGAAQAAIKEDPWNCYMCGHKGTYGLLRRREDWPSRLQMFFANNHDQEFDPPKVYPPVPAEKRKPIRVLSLFDGIATGLLVLKDLGIQVDRYIASEVCEDSITVGMVRHQGKIMYVGDVRSVTQKHIQEWGPFDLVIGGSPCNDLSIVNPARKGLYEGTGRLFFEFYRLLHDARPKEGDDRPFFWLFENVVAMGVSDKRDISRFLESNPVMIDAKEVSAAHRARYFWGNLPGMNRPLASTVNDKLELQECLEHGRIAKFSKVRTITTRSNSIKQGKDQHFPVFMNEKEDILWCTEMERVFGFPVHYTDVSNMSRLARQRLLGRSWSVPVIRHLFAPLKEYFACV

SEQ ID NO: 593 - DNA, 2739 bp, Homo sapiens
  source 1..2739: mol_type = genomic DNA
atgcccgccatgccctccagcggccccggggacaccagcagctctgctgcggagcgggaggaggaccgaaaggacggagaggagcaggaggagccgcgtggcaaggaggagcgccaagagcccagcaccacggcacggaaggtggggcggcctgggaggaagcgcaagcaccccccggtggaaagcggtgacacgccaaaggaccctgcggtgatctccaagtccccatccatggcccaggactcaggcgcctcagagctattacccaatggggacttggagaagcggagtgagccccagccagaggaggggagccctgctggggggcagaagggcggggccccagcagagggagagggtgcagctgagaccctgcctgaagcctcaagagcagtggaaaatggctgctgcacccccaaggagggccgaggagcccctgcagaagcgggcaaagaacagaaggagaccaacatcgaatccatgaaaatggagggctcccggggccggctgcggggtggcttgggctgggagtccagcctccgtcagcggcccatgccgaggctcaccttccaggcgggggacccctactacatcagcaagcgcaagcgggacgagtggctggcacgctggaaaagggaggctgagaagaaagccaaggtcattgcaggaatgaatgctgtggaagaaaaccaggggcccggggagtctcagaaggtggaggaggccagccctcctgctgtgcagcagcccactgaccccgcatcccccactgtggctaccacgcctgagcccgtggggtccgatgctggggacaagaatgccaccaaagcaggcgatgacgagccagagtacgaggacggccggggctttggcattggggagctggtgtgggggaaactgcggggcttctcctggtggccaggccgcattgtgtcttggtggatgacgggccggagccgagcagctgaaggcacccgctgggtcatgtggttcggagacggcaaattctcagtggtgtgtgttgagaagctgatgccgctgagctcgttttgcagtgcgttccaccaggccacgtacaacaagcagcccatgtaccgcaaagccatctacgaggtcctgcaggtggccagcagccgcgcggggaagctgttcccggtgtgccacgacagcgatgagagtgacactgccaaggccgtggaggtgcagaacaagcccatgattgaatgggccctggggggcttccagccttctggccctaagggcctggagccaccagaagaagagaagaatccctacaaagaagtgtacacggacatgtgggtggaacctgaggcagctgcctacgcaccacctccaccagccaaaaagccccggaagagcacagcggagaagcccaaggtcaaggagattattgatgagcgcacaagagagcggctggtgtacgaggtgcggcagaagtgccggaacattgaggacatctgcatctcctgtgggagcctcaatgttaccctggaacaccccctcttcgttggaggaatgtgccaaaactgcaagaactgctttctggagtgtgcgtaccagtacgacgacgacggctaccagtcctactgcaccatctgctgtgggggccgtgaggtgctcatgtgcggaaacaacaactgctgcaggtgcttttgcgtggagtgtgtggacctcttggtggggccgggggctgcccaggcagccattaaggaagacccctggaactgctacatgtgcgggcacaagggtacctacgggctgctgcggcggcgagaggactggccctcccggctccagatgttcttcgctaataaccacgaccaggaatttgaccctccaaaggtttacccacctgtcccagctgagaagaggaagcccatccgggtgctgtctctctttgatggaatcgctacagggctcctggtgctgaaggacttgggcattcaggtggaccgctacattgcctcggaggtgtgtgaggactccatcacggtgggcatggtgcggcaccaggggaagatcatgtacgtcggggacgtccgcagcgtcacacagaagcatatccaggagtggggcccattcgatctggtgattgggggcagtccctgcaatgacctctccatcgtcaaccctgctcgcaagggcctctacgagggcactggccggctcttctttgagttctaccgcctcctgcatgatgcgcggcccaaggagggagatgatcgccccttcttctggctctttgagaatgtggtggccatgggcgttagtgacaagagggacatctcgcgatttctcgagtccaaccctgtgatgattgatgccaaagaagtgtcagctgcacacagggcccgctacttctggggtaaccttcccggtatgaacaggccgttggcatccactgtgaatgataagctggagctgcaggagtgtctggagcatggcaggatagccaagttcagcaaagtgaggaccattactacgaggtcaaactccataaagcagggcaaagaccagcattttcctgtcttcatgaatgagaaagaggacatcttatggtgcactgaaatggaaagggtatttggtttcccagtccactatactgacgtctccaacatgagccgcttggcgaggcagagactgctgggccggtcatggagcgtgccagtcatccgccacctcttcgctccgctgaaggagtattttgcgtgtgtgtaa

SEQ ID NO: 594 - DNA, 32708 bp, Homo sapiens
  source 1..32708: mol_type = genomic DNA
tgtgatatagctgaagtgctgagtagaattcggggtgcagagctgcgggtggctggtggggtgctggggcgcgcaaggaggctggaggcgggggtgggggggtgcccagccccaagtcctacagcggctgctggaggagtgagatgagcacatagtgagtggctgtgctggtggaattagacagaggtgccccaagtcaggaacctagagccctgagcgctccatggggaaggagaacagcccccacggtgaaggggtgagggcggtgtgtaggcacacacagaatcttccagctggaagagaccttcaatgtcatttcattcaacctcccacctcatgaaatctttcagtcttccagtgcccaactgaggacacccaactctacttggacacctcaaggtacggggaactcactcccttcaaggcagctcatctcagagaggctttggagcctgcgggacggccaggaggagcctggcgctccgaccttggccctgtagagcagagtggcctctactccgcggcggcacctggctgggggttgcggcgcggttgggccagcgctgctgtccccagccccagtgctgaggcaggcagagcgcagtgggctctggcggaggtcgggagaactgcagggcgaaggccgccgggggctccgcgggctgcggggggaggcacttgacaccggcccggggagaggaggggccgctgtccctgcggccagtgctggatgcggggacccagcgcagaagcagcgccaggtagcggggcgcccagcgtggggagggctgcggcgaggcccggagctcggctacgactcgaggggctctgagtggccgggagcgcggccgaggcggggcgcccggggcccggcccccggtctgggcggtgcggggtccagacctccgccaagcggcgtgcggggaccccggcggggccgcagaggccgggaagtcgcgccgagggcgctaggaccggccgcgcgcccaggccgctcccgccgcggcgccccggggccccccagtcggcgctgcctcccgggccggctccgcagcgccggggccggggccagcgcggccgcggggggcgagcggcgggcggaggcctgggcccgcgggcggccggagggagggaaggaggaaggcggagagaaggggtgggagggggggacccggcggaggaggcggagagagggagcgcgacagcgagcggagggagggagcgagcgagcgaggcaggcaggcgggccgggagggagggagggcgcgcgggcggcggcggcggcgagagcagaggacgagccgggacgcggcgccgcggcaccagggcgcgcagccgggccggcccgaccccaccggccatacggtaatgagcgccgctgctggcggcccggaaggccggcccggaggcggcggggagccggggagccgggcggggggcgccgcggctggcagtgcccggctcggggcacgctcccggacccctgcaactcggcgccgggcgcccgtggggccgggactgcaggcggggacggcgggccgggctggccggggcggcgcgggggatttgagggtttgtttatgtccccgcgggctcggcaggcgccccctcccgtcccgcccgctcccggcgcggacccccctccccgcccccgcccggctccgggctcaagttcaagtctatacaatgccgcggggggcccctccaccgccggcctgcgccgcggtgcccggctcgccgctgccgcaggggccccggccgggccgcccccgccttccgggctctgccccagccccgcggccccgcctggagcccgcggccagggcgccggagggcgcggaccccgacccagaaggatcggcccccgcggcggcccgggggagcgggggagggggcgggggccgggccccgcgcaggctccgcggcggcggcagaaaatggcagcctggcacgacccggccccccgcccctccccccggcgcccggccctcctcggccccgcggggcgggggacccgggaggcccccgggggcgggccgaggggtgatggcggggccgggccggggagcgccgcgccgcgatcctcctccggccacctgtggctgggggtgcggggcgccggcggggccgggaggggcggcggggccggggagagcgcccgccttgggggcacaccttcccccggagtgccggcggcacggagaggggtggtcgtgcccggctcctccctgtccccaccgcgggccgtgggtgcccgggcggccgcggtggcggcgccgcaatgtgggggcggggcgggggcgggcgaggatcccgggcccgggcccgggccgcgggggccggaaaacgcgggggtggaagtagcggggccgggaccgggagcggcgcagggggggtacgcccggggtcgcccctccagcacccccgcgcacactcccacgcacgcggacacactcacgcacacgcaccccgccgggccggtgcagacgtgtccttgaaagcttcgcatctgcacagtgaaggacgaggcctcgccgcggctgcggagcggggtcttcggccccacgtccccgcaccccgggagacctcgagcttcggagccgcaggcggcggctgtccgtgtcccgccctcaccccagttcccctcccccaggccgccctgccttccctccccttcggcgcggaccgggctggcgcgggtccagggcccgcccctggcctcccccagcccctcatcgctggggcccgcggccctggggctgccaaactgcttttcgctttcctgaagcctcccttcttgggggcaccctctcccaccccagcgcccctctgccatttctccccctctcctcatcccctccgtcctggcaccctctctccgctgcacggccagttgaggaggtgttggcgccctgggcggggagcagtgccctctggttcccaggggctgcctcccccggctcctgaggggagccccctgcggctgcaccttgacccaacatggcgtctggcacccagcagggcagctctggcctgcggcaggcgggagggtgggcagggccgagccccagggccgcgcagctaccccccctccaaaccagcggggacagaagccttggggagaagcgctgtccgccctgtgacccaacttgcccctcactgccgtgcccagagactgccatcagcatccctgagggcctgctcagtcttcatgtttcaccctaggctgccagcggctgaacccgcctcctgggcgggcggctacgaagggatcctgggatcaggtgctgctccagtgtcgcctcctccctcgcgggcagatgtgacagctgcagccaggggagctattcgccttgctattgcctgggtgttaggactggcctgtgggatttggggggccaggcatcccggggaccctctttggttggctagcaggggccatctccaggtagttttctgagctgcctgcctttggagagttgggttgtagggagttcctgctgggtttctggggcaaaatggtccccctctgcctccaggttctaccgaggccctgcttgggctgtgacaggtggctctgtcaaggtgggagtctgtgtgtgcacatgtgctggctccaggcgagggaccaggctggcctgtgcagcagctctggcacctgcctgcctccctggtgggtccccctcctctgtgcagctcctccccagataagcagctgcggattcaggccgaccaaacttccctcgttaccccacccaggcaccagtgccttccataggagactgaccctaagaaaggtgaattccttctagactcaaggagtggactggtccacagggctgccctctgagtccttcctggagaagcctaggaaaggacgccagcagccatctgtcagggtgtctgcggacaggattcctctgtggggtgggggttggactagagccggaaggtccattccagctttgacattctatggctctgattctagtggtggaatttcaggcctagcaatggggacagggtggtctgtttttcggcacatggcagtaataggggaaggcttccaaggagaaggagatatgagagagatcagggcgcccagcgagttgggccttgggaaggagaggcagtgtgaggagggtccctgcaagagacgggttggtcacgtccgactctgcagagggtgtaaaaagtacagcctcctttaagcctcggcacgtgtgtatcctgtaggtttgtgtataaatccctgtgtgtggataatttctgaggtttccttttcaagtccaattcacagtaagctcctcagtcccttatggatgttttactatcgctttcacacccacctctgccagtggttctcaaaaagctaggaagacaggacaaacggtaaaatccttgtccagggtcaccggcaggaagaagtggagccaggcctgcactcgggggaagatgccccatgctatacctcttacctgggctgctgcatgtgtctgtccccgctctcagtttgtgatctccaggaaacaggggccttgcctccctgggtccccattggacaagcggtgaggcctccgagggtgtctgctgagcgaggggagcgcactgccctccagtcctctccccgaggcagcgaggcaggttagtgctgggctcccttccccctgctgctgtgcgccgctgcccagcggccactgcctacttacaggccagctcctcagggtcacacctccctgaaagacccaagttctttcccagcaagagccagactcccccaaggcttctctttttgggatccaggtagaaagaggactctaatgggtgagttaaaacagaccaccctctccccatctttgggcccgaaatgtcagcattagaacccaaaccttagaattgcagtctgaaagaggagtttaagctctgagagctcttagtgctgggtacgggactgtttgtgggaggtggtgcccagttcttcccagggttgtccatgctacccagagcctgaggcctggagggccattcacgtgccagtcacatgcctctcccagggtacttcctgctgcctccaacttgctggcctggggtcctggacttggtgctcgtatcctccccaccccgtgccccactgggagttgagtgtgtctctggcctccagcaggtagggccagagcatctaccccaatgccattccccatgctgcggccctcggggaatagcttctacttttgtttgaatattagtatgtgagcagagagcccgtcagaagcccacctggcctgaggctgggtttctgcagggactttgctgttcctgagcagggctttaatggtctactaaaggtgccagatccctttccactttaattttgagggctcattttcaatcatttctctctgacgatttttccctaagaacatgaccaaatctgagatccatgaagtgtcagcctgagatttatgtctgtatccgagcctgcctccacttggctaagtgtgtgggcaagacgaggttcagtgcacatgtgtctgtgcatgatgtgtgtgtacgtggtgtgccgccacctgtggatgggtaggacttgcttccacatgagccagtgtcaaggcagcttgaggccctcgagtcacagggagctgcactctgacacctcccagcggcaggaacttgggcaacaactcgattccctgggcctcagtttcctcacctgtaacatgggagtgtgcgtggattctgcttacaggtggttgtgaggatggagtgagatcatgtgcgttacagccttagaggagcgggagccctcctgttagctgtgtctgttttcatcatttgggtggctcacgtggactagcactgcaggaagtgctctaagaagcctcgtccaccttcctgtgtcttttgcagaatcttggtcagatgaggaaagtgccgattctgattaaaaatcctgggaggtgggaggcttctcagcgacacttagcaatctgttgagttgaacaaatctcgtgtcaacaggttgttttgcttccacctgaaatccctcccgctgtagtttcagctcgttattctcatcctgtcttgagtgcagcagcactttcccaccgtattcgcttccattttccagagatgtgctgagcatttcctgtaagccatgccctgtgctggctttgaggggacacggtgtgtttaggatgcgcccagctaacgaagaactgcagagtgggactggggtcactggagagggagaaataaagtgctcaaaggagagtgaggtcacaaccaactaaggtcatcagggaaggcttcttgaaggaggtggcatctcagaagcgccccagagcacagaagtggggcttcaggggcaggacatcattgtgggtggctgtagtgcccgggaggtggactggggcctgggttgtgctggaggccaggctgaggccctgccttggtttggggaggagatccctgcactccggaactcctctgtggcccacggaggatcgctctgaactgcctcagcgtggcggccagtgggggtaggggtggagagaggacagcagggagggaggggaaggggccaaatgagctcatttggtgtcggatcctgattctttctattccatagaccagagcttaagagctcagacttggagagcaacagaacagggtttaaattacactgaccccagggggttgtgacgattaagggggaggccagggtcaggtctggtctgcgagcgagtgatagcagtcatggttgaggatgtggcaggtggagaagggtcccttttctggcctcccagaggtctccatgtccccccttgcccactccatcaggctgaggcgccccagcatccagaacattcctgcaaggggctgccagtgccagggaaatgggggtgaagacgtcaggttcctgtctctgcagcctgaccctgtcccccaacacacacgctgggcagaaccgagccaccaacccagaggggaggtgccctgcagacggcccaggcccccaggcatgagtgcaggtgcctggcagccccctgcaagaacagctggtgggcagggccttctgggccaaatctcccttgctgatcacatcacaggccaccaacctgtctggaggacagcaagggtgcttggtgggcagtggaggtgggggtaagggaggtgcagacgcctggggctttcctagctaaatcccagtatggagtggtttgtttttttttttcagcagcagctctatgttgcctactcctgtcctactgtggtcctctctgacccttaaaggctgcccagccttatttagatatatgaccaggttcctattttctctttcctgtggtcacggccctgctcaccaccatccctattgatctttcctctctgcttctgtttcaaatgtcaaggtcatttttaattctgagccagttattagctgccccgtctgagtgcacagaggggacggaggaccatctcttatagccagtaaccggagagctggaacttgggtctcctgactcctagtctaatgctcttcttactataatgaaaggggaggggggctcagtgcagatgttcgagatctgatagatcagctgggtcatgggttccagtgatccttccttgaaaaggtaaaaagatgcttagagattatggggtgtgggttagatttgcatctcactaagctgttgagtgtgggctgtgtcctggggaatacttgggaacggccatggtctgggggcaggaggccttcggagtgtccctcccccgccactccctggaggaccccgggagacacaggcgagttcgcccctgcccctgccaagccagtgggattccccagcaccccagtgagcagaacctgtttggaaagaggcttctggaaggcctgcacgattacttgtataggttcccgaagtgataaataaatgcatgggtaaaggggaatccacttagattccctaaaagcctttgaaacaaggtggtaggcgagtctgttctgatgtgttagatccccatgcagtagtgttgtggttaaaaaaaaaaagttcatagtgtaatctcagttttgtgaaattctttaaaatcgatacaaatatacacatgtttaggtttgcacatgcatggaaaagttgttctggaaagatacacacaaacctgtcaacaagtttttgctttttaactttgtacactttcgttttctttgaaaaaatgtaaatgaacttgagttactttcttaatgacaacaacaaaaataaaactacactttttaaaagcctgtggatgagaaagtagaaaaaagaattaagtcacctaaggctgagggatggactcttttttataatggataagaaactggtttagagactgacagcaaggggtaagcttactcaggtacgtgtcttttccggaaaggttgcagggagaaatatcgcagatattaaggcctctgagcaaaggcctaggctggtagggattaggtgagagcagaaaataggccgctgactgcatgcaccctggcccacgccagggacaggggacaaagttagctttataggatggcgacttgaaactcatttctgacccaaagtggagaacaaatcactgaggatcttcccccaaaagcatcagtctgatgggctgttgtggcccaaatggttcctggggaactggaggtataactggggcccggcccgggtatggagctcaggtgacccagccctggcatagtgagagcctcttgggaggccacacccaagggagacaaagtggggcttcaggaggccccacgaaggggtagaaggggtgtctaggaacttgcttggcacgtgggttcaactctgatctaggggtccctgagcaggtggtgatcacccagatgatggggtggagaggtgaggtgggggcaaatacaagttcctctgtctgcagtcgtcttgctaccccaggaagctcagggctggttgcttagcaacagcacttaccaccctcttccaccttaccctcccgcaccccacccatgggtgcctcttggggcttcccttcccccgaggctgcccctgttcaataggacatgggaagggtctgtgcacttttttgaccctgcccctggaataaggcaggaacagacataaaaggacctatgacttggaggcaagcacagaactggcccctctacaaaccagctgtttaatccaaggctggtaggggacagatgtgcagggcaaaaaaggcgttcgggagtcaggccgacctggaggactgtctcagccccatttgtgctcagttgctgctggccccaaaccacctggagctgcaggtttttcatctgtaaatcggggataagaatagcagtctcatcttacaggggttgcctgaatgacgtgcaatattttgtgaaacagctagcactatgcctggcacagagaaggtgctcaggaggcatgagctgcttttctttacgtgggggttgttccagggctgcctggttagggtgacccccacaaagccctgctgctctgtaaggccctgctgctctgtaagaccctgcaagtggccaggtgcagtggctcacgcctgtaatcccagcgctttgggaggccgaggcgggtggatcatctgaggtgaggagttcgagaccagcctggccaacatggtgaaaccacctctctactaaaaatacaaaaatttagctgggtgtgatggtgcacgcctgtaatcccagctactccggaggctgaggcaggagaatcacttgaacccgggaggtggaggttgcagtgagccgagatcgcgccactgcactccagcctgggcgacagagtgagacttcgtctcaaaagaaaaaaaaaaaaaagacctgcaagtgtggcctgtcctccccatggcccctcacggtgaggggaagagataatcaagttgagaatgacccccaagcccatggtggactctgggctgggagtcaggggccacaggggagtggcagggatagagaaagatgtctctgtcctccttagcttccgttatctgacccaggtccctttttccagctgccaataagttgtccctttttctcttagcctttctgcacctccacttcttcctgtgaagccaggatttgcctgtaccttttttgatctcttcagagtcccctgtccatgtggggacccagtagcctgctcaaggcctgggccctctttccctccctgcccactggtctctttggagctaagcggagagtggcctttgctgggttctggctctgccccacggcctggaggcaggggagggtctagaccacagcccggcctggcagctggcacgcagcaagggctcctaatggttttattaccagcaacaatgtggtgcttgttgccatccacgcacaggctggtggttcccagcccaactggtggtggcctgagggccctgcctggtactggaagctcagctgggaagcccagtggggctgggcagtcagtcacctctgcgttttcttctgtcaacaccctgccagcagcctggaatcagagggagccagggcacggcatggcgagatgctggcccccgagttggcaggcctggcagcacttgagttttctttccagaggtccctgcctcagatccacaaatgatgttcatccattcatctaagagacctactgtgtgccagacacaggctgcatagatgaagggggtcacactcatctcaatgaccctgcagcttaggtggggtctggcagggcggaaggacccctggcacaccatgtccagggattaccagggctcagagaaggaagtcggattcagggggagagaagatctggaagggctttctaaaggaggtgacgcttgagctgagtctcgaagcggagggagcagttagctaggtggacgacggcactttctggccccatgtggctgcagtgtagggaacgatgggatacgaagccaggggcctgggccgggggacatggaaggcgggatgttatgaacggacgttgggcttgggatttatatttgagaaggatcattctagggcatcgaggacgagagctcgggcaatagggtttaggggcagggagcccgggtggaaggctggcacagaagtccggggcagcaatgtgggcctggacagggtgtgcgtggtgtgacatttaggaagtgcagtcagtaggaacaggcgggataaaagcaatgaggggagttggggtggctgtctggtttctagctcagccaactgtgtgggtggggatgcccttcatggagggggcatgggttggggggagtcggagagagcaggaggtgcctcccacatggagctgggttgtagctggggcttgagggcgggtgggatttccccagggggaggctgagccaggccaggcttgcagaaggaggctggagcctgagtcataaggcctggaggcggggtgccttgtgcgatggatgagaaaggcaggtgcatttcagtctgtaactggtacgacccctgcagatgtttgaaggaagattttgaggaaggtgctcgcacccttgcattgggaatgctgatgagttagcgcctctacttcacagtgatttccccaaaagatgagctgcaaggcctagaccctggccctccacccaggacctgcggcgagcatcatcaccgtctgagaatctttgggtgggctggaagttgatgtcaagctgtccagcctttccgtcactctccattcagaggcaggtctgcggagagagataggagggacaagctggggacagcatttttggaaagcaaacagaaaagaagcaaaaactgttcctctaaaatagaaaggaggcttatgtgtgttatgtgaaggataatgtggaaggctatttccaaagaatttctcaaaaaatgacgtgagccatgtcagcatcattgaatttagatagaggccaggagcagtgtggcatcgtgctggggccaccaggctggggactggacagatgatggtttcacctcacccctgccacctccttgctgcgtgtcattggaagatcactcaacctttcttaggctcagttttaccatctgtaaaatggacataacttcacaggctggtgttgtttgttttgagcattgcttcttggactaaacctggatattttttccttccctccctcgcttctgcacttcctctggttctttgcctcccaagaagcctgtttcctcctgttccctccaaaactccaagttttgagttcccccttcctgggaaggtccattcgtcatgttctattgactctcttgttcccaattattccctgcaaacctggttcacccagtgtatttgaagagcatctactgagctaaatgggagttattgggggtcagttcctgttttctttttaataaggggagggagggtctgtgcagagctgtccgggagagcagagggcatgggggacaggggggatgttgcaggacccagtgggaccacagctgggaccttgccctgtagctggctcagtgtgccaggggataggggcacagagccctggtgggtctgggagatgagcttgggaaggacttggcctggacatgggctaggctgccctgctttccgagccagacctcaggagatggcagagagggccgcttcctctgtgagggccgtacatgatggcccttgggctgtatggtggccttgtgacatgcagccacacccctggggagacctttgaagcatctctgcattctggaggatctgctgggaagatggcttcgcagcggggctcttgttgatgctgccaagaaggccgggtgggagtcgggctgtctctggctgggggtggggtgggggctgcggtccatccgagtgtggaaatccacgtttctctggtttgtgcagacctgtgcaagcagccatgctgcaggactggccccctggaagtggggcatacatgaactcagggtgtggcgttgtaatcaaatgaaatgtacagcataattaatctggcatacccttaatgatatgcataattgtgctgcatggtaattaggtgtaaatggtaagcagttcacataaatgtttttgtaattggtattaattttgcagaggcaaaccaagtttatgtggtttttctcttcttgctctgttagttttctagtacaggcatttccaagcttttggaggaattctattgcaaatgtttgtttatagggcaatgttttgtgttttctctcagaacaatgttatgaatggttatgaggttcccaagctggtttccaaatgcctctttggcccatacagtaggtgaaatgtgcaacgcgtgtgcctgtgtcggaaggcccgcccagcatcctctggctccaggtgccccagcgtgtgcagcatgaggggggctgtgtgcgtgtgtgaacctgtgcgcctgggtcatctctgcatttgtctaggtatatctctgtgtgtgcatctatgtgtgtttgtatctgtgtgtctgtgtgtgtgtgtgtgtgtgtgtgtgtgtgtgtgtgtgtggggtctgcatgactgtgagagactcctgaggccacagtggcaggtagacattctctggtaaatacattccccattctagtggcacggggcctgggctggagacttaggggcatcagctgggagggggagcctggcacagcagccgttcctaggagtgagcacaagccactctgaagtgtggtctgaagccagagtctaggtttcctaagaacatatggcttgcctttctttctgatcaagcacataataatttttaaatgatcatttattgagtacctgccacgtgccaggccctatgttaaacacttgactcagattccctcctatcttaaaatagacttatgaaatagggactctttctcaccccgctttacaacttgggaaactgaggcccgaatctctcagtgacagagccagggtttgaggcagggactgctggaggcagggcccatggttctgagatgtgctgctcagaaccctgggctcttctccctccctcggccccctccacaaatggtttgtttttgttgggacagacgatgaggagaaaggcggccctgtgggaaatctgagagcagcgagctcccttcctgctgaattggttggggtggtgggggacgagctccaacagccgctcccaagccctgaagaccctttgggggacctcctggttttgacccaagagggagctggtttaggaagtggggttgggggactgtggccatggacggtgtggggagagggtggtcacaggccagacaaggactcagcccccctgattcctgtggttcactgatagcctaggccctcaccaaccccttcaccttggggatctggggcaggtgagcctgcagacccacagcaggtgtatgttctgccctcggagctcctgcaaacagcctttccactgacgcagtgccttgggggctctgccaagcgacccctagaatggggattgtggggggtcgctctaggcaccgcagcactgtgctggggatgttgcagctgcctgggagtgacttcacacagtcctctctgcctccagggtcacccggaacggggttgcgggggacaagctgtgggcgggggggacgggcagcaagatacaacgcatgaactctgacctcgtctctttgagaaatcagacacatctatatacgcatggaacactcaatgacccctgggtgggtggtcgaggagaaggggacggtgttttgggggaggagagatgttgggttgaaggactgggagagaggagctgagtgggccctgtgggagagggtgggagccaggggtgtcattccgggacagcagccgggcctggaatgatgcagctgggagaggtgggggcacggccagagcagtgggcggaggctgcgttgtagccagccctggtgagaccaggccagagcgtatattttaccacgtgtgcaaatctttggcatcaccggatttttaaaaataatagctttaagatataattcacattccatacagttcacccatataagtgtacagttcgatggttttagtacattcacaatcaactttttaaaattgtcatgaggtgtcataggttttcatagagggagccatgtgtgggcaatccttgctgatagggtggggtgggaggtagagatgccagaggcaggtggacccgctccagggcatctaccaggttattgtgccacagacacaagaggtacaaagggcctggagggaatagggggacgagagaagcccaaggaccaggtacctgctggatgtgaggacccaggggaaaggtgggacctgagttttctccagggtttgggacttaggcagctgaagggaggggaatgttacttccacatagagggaaaaaccagaaaatagagccggctctgaaagaagcatgttctggaagagtaggattttagggactgcaagtcatccagttgggatgaaaataaatagagctggagcccctggcagtaggaggcgtatgttaacttatgcccaggtgtcttagaggaagagcatttagagagaagctgaaggtagaacatgacctttgaggagcacccaccgtgcagaagtgggatcaagactcccggacagccccagagacaaagctgcagaatctgaggctggagacccagaagcaaggagccagatggagtcatggctgggagagaacacacagaaggcagttgctggtgagctccagaagcaggggtctcctttcactccagggcccggctccacaatggcactcaagaaatggctgttgagtgagtgcttgaagcagggagtgattagctggccaggatgttgaattgagctcaagggccatgaggatggaaaaaagccctttggggccgcgggtgactgtatcagtcagggtccattcagaagacagaaaccacatggtgattggaacaaggaaagtttcacataacgaattattaactctaattggattggaataatgaggaattggctagtaagaagtaaaaataactccaaagaatacaaaaataatagatatgagaacagcccctacctctagggttgccacagagtgcccaaggaagaggccccgcagggttgagatccacaccttgatggagagggtgtggcgatggctccctggatggcaacgtctctgtaatgccatgttggcagaacttgctggaaatccaccctctggaatttactggaaatccatctttttgggtcccaaggaaagttgtttgtgggaggtatcttgctggaagcacaccgctgctacgttttcccaggggagtgctgggagaagctcctggctgttgggtactcctgactgacgtgttgctggagccaggtgctggagaagctgtctgcattgcaacagcctggcactcctgcaggagctgggcactggaaagctgcatgctggagaagctgcagcagcacaggagctgggtgctgggaagcttcatatctggcaagaccctgatgctgggaagcgcccatgcagcaagatctggctgctagagaagttgtatacaatgcaggaacccaacaagagcacactgggtctagaaaggaaacccacctcctccttcaatgcctcttcagtgccctccacagttgtgccagctgacaaaggaaaagtagttaaagggcccagctccatcttcacagcacaggcaatgatgggcgaataaactgataactggcacagtttacccctttggctgcacagcttccatttgcacctttctacaacatctgaactcccatacaaaaacaaacaactggatgtctacctatcaagatagttatccttcttatgaaattctcacccttttgcccagagagccccaaccatcattctaccaatccctggctacaataacttctcaaagtcagtcacagtctcactgaatattctgttacctaaagactacattataaagctaactgtcaacaacttgtatagaaaagaatgggaaggagaaaaaaagaagaaaatggttaccatattgcaaacacaccacacacacacacacacacacacacacacacacacacacacacatatatatcaagttaatagaaaatgtgcaaaaccactagaggcctggtttctgcatttgttcacaaggctacactttacacttgctacctggcttcattgtcttcttatcccattctgtgtttcctccacactcagccagagccttagcaggtcatgcttcttttacttggtggagtaacccaaaccctcattcccaaaggacctgaatccttagttatcccgcttttgttgttgttaccataactttccattcagccttcctttgggcatggacgttcttaagaggtgcctgagagaattcgctgggttccagacacagtcttgcttggctctgtggctgatcagcaatccagttttctccttggtaactaggatcaatcactccagacagtggcataactccttttttccactgtcagttcagtggcgtaaggagttcgagaaagccaagtgggtgtgtgtgtcttctctcccagggaaagcattataatatgtccctggtgggagcactctcccccgaggacgaggtcagcatccccagaaggttttagagttgtggggtggggaaacagggccacgcgcaggggactaagtgatagaggctctggagctggcagctgtggaccatgctgtagagaaggttggaaaagtagagaaacatgcagatgaccgtgggccgcttccgctgtggatgataaaatcagacccatgctggtcactgccagaccccatccaggaccatgtgtctgattctcacatggactctgtgccaccctgtgcccctgactcccaggccgtgggaagcccatctgacccacagcacgtgtgacccctagacagggcttctcctggcttgcagcacttggaaatcggtgctgccttacggaagtctgtgttggctcattttggctcctgagaacaacttcagctccttaacagcatctattttaggtataaatcccccccccgctcacttttggggctgtgtcatggcaaccattagtgtgagcaaagcagtctgactcagactcccatgtggccgccgtagtggcagcaggtttggtgtgatcataagtgctcctgctggtggtgccagtgctggtggtgccagtgctggtggtgccatggcctcgagagtggtgtgagagccacaagccgtcttattgtgactctagagccagataaatcagctttgcagagggcaggactgctggcctgtcaccagtggcttttggtattctatggacagctggtagtttgggtgcaagtaatgtttctgaaagtcagggcaatggaatggtgatggccatctcactggaaaatggcaccaagacccccctccctctccctcctccttatccatccccagtcttatgaccaagagaggttgtgacaggagggggaagagttgacagatagacatctccgtctaggaggtctcctccactttctcctggcccctagctgacccctaccctagcagatgattgggcagggggtgggggtggggcacaagatactctgctgccttctgtcacccacatttgcacctcctcctaagctcaaataggaaatttagccatgggactgttatctgtgggccagggtcaccccagaggcacaaacatcgatcatggcgctggctctgagatgtgtgtttagcatgctcattcatgaccaagaactgccacatttgcgaagggttctgagttacacggacctggatttataatcctgccctggggctttctagctgtgctaccctagagaggtattaaacctctttaagcctccatgtcttctataaaatggggataacaataggacctgcttcataggattgttttgaggattgaggatagtgcatgttccttagcacagtgcttggcacatggtaggtgctcaggaaatagctgcatgaatgaatgagtgaatgaccactgcattgggcagggcattgaatactgtgattagcatgctccagtgccctccttccccgctcccactgcagacaagcctgaccaggagagagagactgactggaaactttgttttctggccagtccgtgcccaaagttaatatagatctgcagcagtcacatgctgattgtgagagagggagtggagagctgtgagcttctgagtggggtggacctggactgtgcctggctccaccccttacccactgtgtgaccttgggcagttttattaatctctccatacctcattattctcatctggaaaatggggataaaaatagtacccacttcaaagggttggggtgaggtgtgaggattaatgagatgttgacattgtaaagctctgctcacggggcctggcatgtcggaggagcttaagtacaagctcctgcctgagcgaaggccacttagaggaactccagggatttcaagaaaggagagaaatctgcgggctggttgaatctgagagtaatcatcgttaagatttattgagtactttctctgtgccaggcgctcttggaagcatttttagggcattccattttaattttcacagcagcgctgtgaggtggaaagttctttctcccactcgacagctgagaaaactgaggcacagtttcgcctcaggccacacagctggtaagaaataaggccagtgttggaaaccccgcagttggcctcccagggagccctggaggggactgagattagcccttaggtcaggagggtgtcaaccacaagtcatagactcataccaaagtagtgaaagctcacagtccccggaagttcagagacgtccctgcctccaggaacagcaagaccaggggcccagacagtgactacaacgctttatccctctgtcttcatctctgagctcttcgttctcaggcaggctcacccacatggcgggaagacagcagctggcagcccctgactcacatcgaccatgttagcatccttccatcgcatcgataaaaaggttccagggaggcctctgattggctctgcctggtcacgtgctcaccacttgcctggggtgagggttgaggtcagcacaggcacaacgaaaaccttttgacaagcgtttcccaccgggaaggaggggaaggcatctaggtagagcagaacaaccagagtccactagaggaaaaggagaatgcaagcagagggagggagaaggacctgctacagaaatggtcagatatttttcagccattcagacagagaacttgagacggagaagaaggggcccttagggtgagaatattgggatcgtgtttggtggagtgaggatttaggtttgtgggccgtgacagttttggttttggaagaggataattatgtgcaagcccttgttgaggagagactgtggggtggcaggggggccagcagtcctcaatctgaagatggagaggaggcttgggtggtcatctcgggggtgctgatgaggctggggttggtgaggaagtgggggcggcagtggggacagtgtggtgcaggggagcagtcctgaggcttcaggagatggtggagatgtagctctttggtctgagaaggggctgagtgagcgggggttggggttacggatgcaggcagcactgacttgcgctgcccatgggctggacgcagcgggaatgatgtgtttggaggattaaacatttcgtgagggtggggggtggagagggaggtaccagtgttgtagctggtgatggaactctgtgtgggtgtgaggagctgatgatggttattctgtgggacgtgatgatttcatagaacaacagaggtggaaaggcctcagctacactcttatttatagagaaggaaatggaggccaaacgcaaccgatggctgcagttgggacgtaagccctttctcccatccccactctctctgtttaaaaattcatttttatttactcacagtagtacatgcatataatttaagaagtcgaatagtactaaaacctcctaacaaaatgcagtgattccttgcctactcctacccttatcctcttctcagaggcaaccgctttcgattctcttggctgtttcttccagcaattttcatctcatatttctgagtaaagtgcatatttttgattcatctatttagacattttccattgatttcctatttagtagatcctcttacatgtccaacctttctgctcttcagccatcctccttaaatattgacagtactcttcttatattttttcaaaaaattgtttgttgttgattgttttgagacaggatctcgatctttgcccaggctggagtgtggtggcacaatcacagctccctgcagcctcgacctcctgggctcgagcgatcctcccacatcagcctctcgagtagctgggactacaggcatgtgccaccacactcggctaattttgtaaatttttgtagagacaggatctccctgtgtcatcagactggtcccaagtgatcctcctgtcttggcctctcagagtgctgggattacaggcatgagccattgtgtccagcctcaaaaatgttttgtgcatttggtagccagaataatggcccccctaagatggccaggtcctaatcccctggacctgtgaatatgtcaccttacatggcaaaagggactttgcagatgtgattaaattaatgacctagagatgaggggattatcctggattatctgggtgggcccagtgtaatcagaagggtcattagaagtgaaagatggaagcagaagagtagtcagagcaggagatgttgatgaggcagagagtactgtgatgggaaaaagactggccatcgctggctttggagttggaaggggaccacgtggcaaggaatgagggcagcctctagatgttgaaaatgtcaaggaaatggattctccttagagtttccagaaaagaatgcagccctgccaacatcttgagtttagcctagtaaggagaatctttttttttttttactactgacttgcagaattgcaagataatttttttttttgagacggagtttcgcttttgttgcccagggtggagtacaatggtgccatctccgctcaccgcaacctccgcctcccaggttcaagtgattctcctgcctcagccttcccgagtagctgggattacaggaatgcaccatcatgcctggctaatttttgtatttttagtagagacggagtttctccatgttggtcaggctggtcttgaacttccgacctcaggtgatccaccctcctcggcctcccaaagtgctgggattacaggtgtgagccaccgcgcccggccgataatgtgttgttttaaggcattaattttgtggtacatacaaaagtaatttgtgtgtacatacatgcatatatacatatatatgtacacacacatatatttgttaaacctacacacagtgtttattttattatttcgataaaactattattcacagctgagccttgtggtgcactgtaatagtttcttttcgtttttttttccctgaagttaataattaccttgtttctcatctgccttatttttttgtacctgttgctaattcctaccacaacttctaatataattttatttttctttaacaatactgttaccttaggacttctttttctttttttctttttaactgacacataataattgtgcatctctatggggtacaatgtgatgtttcaatacatgcatacattgtgtaatgatcaaaacaggatagttggtatatccatcacctccagcatttatcacttctttgtggtgggcctaccacactttccaatagccatcagtattgctttccacacgggcagtcacagcaggtaaaagatgtttcagttccattttttaagttatctatcctctttcactctgggctagttgctttctaggcacattgtagctgatgctctgtgacttccttttgtggtcatctttggaattcccattactttccggttggaatctctgttttctggctttcgtgtcctcctcatgcttggctcactcccctcattagagcacatcttccaggacacacatctgtccatatcaaaatccattcatggctgggcacagtggctcacgcctctaatcccaggactttgggaggccgaggcgggtggatcacctgaggttaggagtttgagaccagcctggccaacatggcaaaatcccatctctactaaaaatgcaaaaattagccgggcatggcggcgggtgcctgtaatcccagctactcgtgaggctgaggcaagagaattgcttgaacccacaaggcagaggttgtggtgagccgagaatgcgccactgcactccagcctgggctagagagcaagggtccatctcaaaaaaaaaaaaaagaaagaaagaaaaaatctattcagttcctgggtttagatagcagagtatggccacgagcgatacctgtgtagttttgtcaggtaaaaagacagttcgacagcagagggcatggtgatgacggcactcgtgccccagtctcagtgggaaggctggccctctctggctcatgccaggtgactggcatgcggcctcttttccccttcatcctggagcctcccttcccatctctcctgtactggatcttatgcgtattagaggacatcttcctgtccttcctgggaaaggagcgtgaggcctcatatgtctgaagatgtctttactagggcccagcacggtggcttacgcctgtaatcccagcactttgggatgctgaggtgggaggatcacttgagcccaggagttcaagatcagcctgggcaacatagtgagaccccatctctatttaagaaaaaaaaaagaccccgggcgtggtggctcatgcctgtaatcccagcactttgggaggctaaggcgggcggatcaccaggtcaggagctcgagaccatcctggctaacatggtgaaaccccgtctctactagaaatacaaaaaattagccgggtgtggtggtgggcacctgtagtaccagctacttgggaggctgaggcaggagaatggcatgaacccgggaggtggaggttgcagtgagccgagatcccaccactgtactccagcctgggcgacagagcaagactccgtctcaaaaaaaaaaaaaaagaaagaaagaaaagaaaagggccaggcgtggtggctcacacctgtaatcctaacactttgggaggccgaggcaggcagatcacgaggtcaggagattgagaccatcctggctaacacggtgaaaccctgtctctactaaaaatagaaaaaaaattagtcaggcatggtggtgggcgcctgtagtcccggctacttgggaggctgaggctggagaatggcatgaacccctgaggcagagcttgcagtgagccgagattgcaccactgcactctagcctgggcgacagagcgagactccatctcaaaaaaaaaaaaaaaaagaaaagaaaaaagaaaatgtctttattttactctcacacttaaatgataatttggctgaaaataattctaattggaagattgtttaagatttggtttattctttaagaattttggctgggcacggtggctcacacctgtaattccagcactttgggaggccaaggtgggtggatcacttgaggtcaggagttcaagaccagcctggccaacatggcgaaagctgtctctactaaaaatacaagaattagccgggagtggtgacgggcgcctgtggtcccagctactcgggaggctgagaaatgagaatcacttgaacccaggaggcggaggttgcagtgagtggagatcatgccacttcactccagcctgggcaacagagaaagactccgtctcagaaaacaaaaacaaacaaaaaaacccaactgatcggaagctctgagaatgatagtggacttgttggttttcaagtctacataggctgacctgaataagtcattttgaccccattttggtactgatgttggtattggcatccttaaacctttcctcttagactcattcgattctccagagaaggaaatggttgtctggctgccagtattcttagagcccaatcggggaatagcctgagagactggacatcagcatttaaaataaccttcccggccggcgcggtggctcatgcctgtaatcccagcactttgggaggctgacgtgggcagatcacctgagattgggagttcgagaccagcctgaccaacatggagaaaccccatctctactaaaagtacaaaattagccaggcttggtggtacatgcctgtaatcccagctactcgggaggctgaggcaggagaatcgcttgaacccgcgaggcggaggttgcggtgagccgagatcgcggcattgcactccagcctgggcaacaggagtgaaactccatctcagaaaataaataaataaataaccttcctctccttggtttgatatatcatctttgtcttcagctgtgccaagtgactctgtgcaaagaccccctattttatgccctccagtgactacagataaaccttcaaacttgtagaagagggtctaggaattcactactctcactcagcctctcgtttctcacacaagcatcctcttcagccctagtgccagagtacctggtgctgtcatataagcatctgttgaagactgtgttatatatcagcgttcacacgcctgtctgaaatttggctgtcacaagtctgctttccagattccacaattttgttggtggtattccttctcttgttcagcctaatcttgtgattttatgtcttaaaaaatcttttggccaggtgtggtggctcatgcttggaatcccaacactttgggaggctgaggtgggaggatcctttgaagccatgtgttcaagaccagcctgggcaacatagggagaccctgtttctacaaaaaaaaaaaaaaaaagccaggtgtggtggtacatggctgtagtcccacctactcaggaggatgaggtgggaggatcacttgcacttgagcccaggagtttgaggctgcattgagctatgatactaccactgcatccagcctgggtgacagagcaagaacctgctctaaacaaacaaacaaaaaatgtttctattgcattgagtttagaaggtagtgagccttggtatgcatattcaaagctttcagttctttttccacaacagttttatagttgacgcagtggagatggtgatcatatcagctgtgatacgaagatgttttcatggtgggattccttgaaattttttaagtggctgttaacaaacattattcatggtcactgtggactctaaaaggaggaaataaaagctgcttttcatggtggtagggttcttggcaagggttttttggtggcagtggtggtggctgtgcagcccttggcccaggtgggaagaacgctttggtatcggaagcagccagggctgtgcggtggaaggaccgatgtggtggacacccgctgctgtgttgggactgtgggcccaggagagcccactccccatggctgggctgcctgaaggaagaatgaagcgtctacgggtaggtgggcaatgctatgtcaaggtctgggaccttggccaccaactggggccccctagggttgtgtagtacatggcccgcccagacacatactggaggattttaggtgatggacacgattttgagggactgctactgacagggctggtccattgagcaacacgaaagggttgacccaggtcagctgcattttctgtgaggacagtttctgcagctcagatgtcagagtcttgggtggaggaaggggaggaggaagagaatcttcctttcctttcctgtctggggtgtctgcccttggggccaatgccctgtgaagttctgcttttccctccagcttccttcctctccagagcttctctgaacctcgccacacccgtggcggcacagatgccctctgggtgtccctaagcctagggcagcatcaagacaaccctcccgccccgcttcctttgtgcctgggtctcccccgactccatttggggtgccctgtccttgtcagccccttgtgtgtccactgtgcctgtggggccgcaacagcttccttggccggtcagagctattaatagaaggggtcctgctctcccatttcattggtggggaaactgagggccggggaagcctccgtcaggagtagatcccacccctgcggactttgggctcaacgttctttccaatcagactctgcccctcttagcttctgaccctttcgaaggtttttgttttagtgtggctggagatgtctgtggtaacaaatggggagtgaggcttgacagggaatcactggctgctaagggctggcagccgagtgcttctgggttggaccagttctcttttgggatcttcagagttgcttctgtggtgtgtgttgggggacgtgaacccaacccctcagaactttagtgtcagagagatctgggttcatgcctctgatgggtcctggccttgttgatcttaccgtcacctgtaaactgggcacggcacagcagctgcccagatgcagagcacgagccaggccctgagtggcatgtggccgatggagctgctctccgctgccgtccaccctctcgggacccgggcagcaaaccttccttaagcccagcactgcgctgtgcctaggggtatggggaatggacgcagtgcacctgggctgcctcagggctcagctgtggggcaggtccgcttcaagcctttctgggttgacctgatggagctcttcctgtcctggccctaagaagctcctcctgccagctccttcctcccactaccccctggggcacagccagggctggggcacccactcccaggcaagaatgcacccctggagaaaggggctaggcctgtaggagagccaagcctgtgctttctcccggtcctggttttccagggagccctgactggagggggatgggaggagaagcccaggagggagggggagctggggaagcagaaccaggaactggaaggggaagggtgtgggtgggcccagatccagcctgcctcccgctctcccttgcctgccaatcccctcctgggccctggcacactcaaggcaggggcttggcggccgcctcctccgggggtggggagcaggggagctcttgtgtgtctctgagtgagggggctgagacagcaacacccccaccccagctgtggcctgagctgcaggctttgttatttctctggcttgaggcctacacctggagcagagggaagaaaagcccctaaactcagccgtgtgggttcagaggacccctcaagcccaccaactctgcaggcaaatgaggctggttcatggggtgggggagagagcagcctcactcctgcctcagtgtggccgtggcctgtggccttggccgtggccgtggcctctccctcctaggccagagccaaccaggcctgcagcctgagctcagacctcagctttctctgggcccaggcaccggtcctgaagtgaggtgacattcatttcactacatcctgtgactgcactcacttcctccacgtggcgggaggtgtgggggtgggggtgaggacagattagaaggaaaacgtagctgggctaggggcctctgggggaggctgggatttcccaggggctggttggggtgggagggaggatgcgggaagctttcaaaggagagagaggctgtgaatgaagagaagggaggaggcggaggcagctggaggtcccagaagtggcacccattggccgcagcgacacggaggggagactgctgccactccaaggctctcagaggctgctggggtaggaggtggccctgaagggagcctgcctcggtttctctgctctctggggtgctggtgaggccagaaggaggagcaacaccccaggcctcacaggccaggtgtggccctgggctgagggcctgacccagggagggtggggtgctccgccccactgatcctcttctctcccccacaggtggagccatcgaagcccccacccacaggctgacagaggcaccgttcaccagagggctcaacaccgggatctatgtttaagttttaactctcgcctccaaagaccacgataattccttccccaaagcccagcagccccccagccccgcgcagccccagcctgcctcccggcgcccagatgcccgccatgccctccagcggccccggggacaccagcagctctgctgcggagcgggaggaggaccgaaaggtgagcagcgggctctgctggggaccctctggcctgggagagggagagccctgtccctatgtgatgacagccggctcctcatactgagtgcatgaccgcatcactcagtgctcacgacagggtgtgggaccatcacatccctgtttgggtgatgaggaaacggaggcttgcagaggttcaattctggtgatggagcaggcatttggttccaggacccaggcttttaaccaccatggcattcgcacagtggctcaaagcccaggtctgtgccattgtgagggttcggcctcacagagagtcccagaacctggattccttctcggacccgcctcttactagccgtgggccttcacgtgaatcactttctctctcagctgcctctgtttccttaaggtgttcagtagcttctaggggaccaaagacaagttctggggtggggcacggcagacacgaggccgcgggggcccaccctcccacacagacggaggcacaggctgggctcagtgtggcgccagcacactttggagatggtgatttcctgtccccgccccccaccccagactccaggtgaatgtcgctgggttatctttggtatggcttttggccacggagctggtgacctccatgttttcagaatctagttgggggtggcctctccacccttctgctgaactccaggttgtgcctgaatcagtcagaggagattacatcagactgatgggagtccctgctgggtctccacaggctgtcttgggaccttaccaagctgtgtccccatgataggaaaagctgccccttaacccccagcactggactgtgttgccctctgtcagtggaatggtgaactcactgccaccctccaggggatcttatgatggccataggccttcctggcatgtctgtctgctgtgcctctgtccacagttccccctgcctgctccccttcccctgagtagcgctgggggttgtgctgcttggtggtgtctgggagtagctgggcatgctcatgggggcaccagttggttcttttggaacaaaggtggacacctggcaccagctttgggggccctgggcactctggggctagaggcagccagcaccctacctgaagggtgtcagctctgagacctccctcttgcgtgctcagctccttcctgggtttaccattcttcagagtgtgtttctgtttcctagttttccatcaatggttctatttggtccttggggacaactcttgaaacaaatggggcagggacagatggccccagtttacagatgaggaagctgagccccgctgggcagtggcaggtccagatgacagcctgttctcctgtctcccaggtccgagcccttcccacagccctacctgcataggtcctgctagggacacatgtacacatcccaggagtgcacatgacgcccagggacctgccttcccagcccagcaccctgtagagcaccgtgggggtgtgtgcacccagtcagccagagcaggtcagaaagccagcatgcgctgcggcccactgggcaggacgcccggggcgaccgatcaggctcctcccttctgaatccatgggaaaagaactgatagtcctggatacctgcgggcccctaggctgcccccgctcaggactcaagcagcatgaagacccaagccctttggccgtagagttggggacacctgccgctgtctgtgctctggagtggcaactgtggccatggctgactccctccccttcttgggcctggcttgctttctctgtcggataaggtgaccccgagtgtcgccccactctgggtccgatgtcctgacagttgctgacgcagctccccatcaatgcactggcagtcactggtcagctgctccccacaggtggggagggtggggacagctgggacaaactcctcctgttactggactgtactcccacgccgctgctgctgctctgggctgcggagccccaggccaccaccaatggacgggagcaggtcaggatctgcattataatagctcaggactgagaagcaacgctggaccaggagtcagaaatcccaggtcctagtcctgagtatgccacttactggagatgtgacttcaggccatctgggcttgtgtttgctcagctggaaaatggggatagtgactccagccttgcctgttttaaagggtggttgtggaagtcagataaggtcatgggcatggaagtgacctgcagacagcaaagtctggtccaattatgagggattacgattgctattattatctacccatagtaactgctctggctcaagcggcaacaaacacacacccagccctagatcccggtgctgatagagtgcacactcacaccccagcaggaggggtcatgccaaaagatggcagtgatctggatagataagggctgggccatagccaggcctcctccccagccgcccacacctacaccacgcatgctggctcacctggcacacttccccggcacctctgggctggctccagcacctccagggagccgcccagggagggtggggagagacactgacagccaccacagcagcccatgaaagccaggcctgcggcaggggtgctggtagctgcagaggggaagacacaggcttggtctgcagcccagggagcctggcacaggtgccaggggcactgtgcacaaaggaactgtttggcaagccagatggaaggggtgtggccaaccaatggcccttccactgcctggccccatgtggccctctagcctctgcccaccgccgccccccctccccgcccccgcccccagccccgcctccatgcacctttcactccagccccactcccatacttcctggagtctccaggtctttgtttatgctgctccctctgccgcatgggccctttccctaatctcttctcctccctggtcaaagcctcaaagcccaggctgtagttggccttgtattatagtttgcaggggaccagtggttctcaaagtgggatccccaaatgagcaacttcagcatcacctgggaaggcaaagctcaggccccattccagacctgctgagccagaactcgggggatgggacccagccgggcacctttaaccatccctccaggggatactgttgcgcacagatgttgagaactattggtgtagataacttctgcccactgctagcctggagcgcagggtcacggcccttttcttccatgtgaatcccccggacctggaatagcacagagtgggtgcttgggaaatattttacggatagaacggaaagaaaaatgagagtagccaagaccctcccacaggagaataatcccggagcccaggatcagggaggcggagtgcagagctgtgggtgctgggctgaggcagccatgctgtggctgggagtgtacagagtggcctgtgtgtgtccccctggcacctgccgcc

SEQ ID NO: 595 - protein, 585 aa, Homo sapiens
MAPSTPLLTVRGSEGLYMVNGPPHFTESTVFPRESGKNCKVCIFSKDGTLFAWGNGEKVNIISVTNKGLLHSFDLLKAVCLEFSPKNTVLATWQPYTTSKDGTAGIPNLQLYDVKTGTCLKSFIQKKMQNWCPSWSEDETLCARNVNNEVHFFENNNFNTIANKLHLQKINDFVLSPGPQPYKVAVYVPGSKGAPSFVRLYQYPNFAGPHAALANKSFFKADKVTMLWNKKATAVLVIASTDVDKTGASYYGEQTLHYIATNGESAVVQLPKNGPIYDVVWNSSSTEFCAVYGFMPAKATIFNLKCDPVFDFGTGPRNAAYYSPHGHILVLAGFGNLRGQMEVWDVKNYKLISKPVASDSTYFAWCPDGEHILTATCAPRLRVNNGYKIWHYTGSILHKYDVPSNAELWQVSWQPFLDGIFPAKTITYQAVPSEVPNEEPKVATAYRPPALRNKPITNSKLHEEEPPQNMKPQSGNDKPLSKTALKNQRKHEAKKAAKQEARSDKSPDLAPTPAPQSTPRNTVSQSISGDPEIDKKIKNLKKKLKAIEQLKEQAATGKQLEKNQLEKIQKETALLQELEDLKLGI

SEQ ID NO: 596 - DNA, 1758 bp, Homo sapiens
  source 1..1758: mol_type = genomic DNA
atggcgccgtccacgccgctcttgacagtccgaggatcagaaggactgtacatggtgaatggaccaccacattttacagaaagcacagtgtttccaagggaatctgggaagaattgcaaagtctgtatctttagtaaggatgggaccttgtttgcctggggcaatggagaaaaagtaaatattatcagtgtcactaacaagggactactgcactccttcgacctcctgaaggcagtttgccttgaattctcacccaaaaatactgtcctggcaacgtggcagccttacactacttctaaagatggcacagctgggatacccaacctacaactttatgatgtgaaaactgggacatgtttgaaatctttcatccagaaaaaaatgcaaaattggtgtccatcctggtcagaagatgaaactctttgtgcccgcaatgttaacaatgaagttcacttctttgaaaacaacaattttaacacaattgcaaataaattgcatttgcaaaaaattaatgactttgtattatcacctggaccccaaccatacaaggtggctgtctatgttccaggaagtaaaggtgcaccttcatttgttagattatatcagtaccccaactttgctggacctcatgcagctttagctaataaaagtttctttaaggcagataaagttacaatgctgtggaataaaaaagctactgctgtgttggtaatagctagcacagatgttgacaagacaggagcttcctactatggagaacaaactctacactacattgcaacaaatggagaaagtgctgtagtgcaattaccaaaaaatggccccatttatgatgtagtttggaattctagttctactgagttttgtgctgtatatggttttatgcctgccaaagcgacaattttcaacttgaaatgtgatcctgtatttgactttggaactggtcctcgtaatgcagcctactatagccctcatggacatatattagtattagctggatttggaaatctgaggggacaaatggaagtgtgggatgtgaaaaactacaaacttatttctaaaccggtggcttctgattctacatattttgcttggtgcccggatggtgagcatattttaacagctacatgtgctcccaggttacgggttaataatggatacaaaatttggcattatactggctctatcttgcacaagtatgatgtgccatcaaatgcagaattatggcaggtttcttggcagccatttttggatggaatatttccagcaaaaacaataacttaccaagcagttccaagtgaagtacccaatgaggaacctaaagttgcaacagcttatagacccccagctttaagaaataaaccaatcaccaattccaaattgcatgaagaggaaccacctcagaatatgaaaccacaatcaggaaacgataagccattatcaaaaacagctcttaaaaatcaaaggaagcatgaagctaagaaagctgcaaagcaggaagcaagaagtgacaagagtccagatttggcacctactcctgccccacagagcacaccacgaaacactgtctctcagtcaatttctggggaccctgagatagacaaaaaaatcaagaacctaaagaagaaactgaaagcaatcgaacaactgaaagaacaagcagcaactggaaaacagctagaaaaaaatcagttggagaaaattcagaaagaaacagcccttctccaggagctggaagatttgaaattgggtatttaa

SEQ ID NO: 597 - DNA, 32707 bp, Homo sapiens
  source 1..32707: mol_type = genomic DNA
gggtgatgttcttgctgtgcttctcgttggccatacggatcctttgcttggcgaccatcttcgcggcgccaccacctgccccggccacccctcggactcgctcactcgcctgcctcctctggagccgctgcgaggctcggctcgtggtgcccgcgccgccggagcgccgaggttctcaggccagacgctagctacggccgctgggcctgggcgccgcaagcgcgaggtctgagcacaagccgggcgccggccgccgactgactgaccgagcggggcaggtgcgcaggaggaagagaactggccgccgggtcgttctcgcgccgccgtcgccgccgctttggccgccgccgtgagcgcggagtgaaagaggaaggaaacgcaacgcaacaacgggaatgtgcagcccgccgcctcgatctactttgggttcggctgccaacgtcagcactagacggactccgccccgcggaagtgcgcgcccctcccgctggagaaggagggcgaaagcaggcgcaccctcccaagctctgtcaagcgtcgccctagatttgcgcgtgcgcgtttgggcgccttttccgcgtcactccgtaaccggaagtgaattggccccgaggctgatggctccggaaacaccaattcgctgtctccacgcatgaggagacgtgtaggggccgggttcggccctggtgaactctcacccgagcggtttctctttccgggacaacatggcgccgtccacgccgctcttgacaggtgagttctgaagaagcgagggactctctttcttcagactagtttcttatttttgtctttgcctttgagaactacccgaggagccggggagtctgatctgccttttcttgtggcttgcggaaaggccagactgttggctttcttgatatagcgtggcaatcggaagtgaagtctccgcctctgggctttcgtattccccctccctttcacccatccatcattcttgcctgcggattcatcttctacagaaatagaagaagggggagaaaaacaatgtgctagttgaatttgtgacacatgggtctgcaatactggtgttacacgggcccttgtgaagtcatttaggtctacaataagaacaaagacaaacatgagttagtcctctagaatgatcacgcactttaaatacacctggacttaagtaattccagattctggccttcctgccttaatgaggtttgtaggactgaatagggagagtggagctgtaatgcaggtttcaaatgatgaaggtgtggttgggagagggtgtagcagtgagcatgatagagatattctagcaacatttgattttgaaatggttatgagcatattagaaatagaacattagaggactcttgaaattttgaagctaaagactgtagtgttggaggagataataaacttagattggaaaatgctggggaagttgctttactagggtgtggctaagagtctgcatatgagtattacgtaaggaaaagagagtcgggaaggaaaagaaggttttggttaagttctgataactatatagaaggaaaaagtcattaagagaaaggttgtctgcatttaaggagggaggctattccctcccttcccccccgcgaaaggaaccttaaaacatttttgcactttttgccagtctacatttctatttttacattttaaaatctttgttattaagcgccatgcccactgatgctcagtctgtcttctgcagtttagtcatcatttatcaaacgccgagtataatcttctagataatataccaggcaaagactgtttaaaaggcaaagttacataataaatttttttttaggtttgtaaaggtagcttgttattcacaatttttaatactaaatgcttatttgaactctaatgaaaaaattacattctaaaatctgataaataacccctcctttaaaaatgcctacagtaggtagttcctctctgcttacagggtagattccatcctatgtagcatagttatgtaaccatttataatctttgaattgctcttgagactcatttatttccttgccatcccatcttatttggtgctccatcaatactgaactgcttctgagtccctttgaacaacctgtttcttcagtctagtactatcctatgcctcttgttgatttggcaaactctttttcatctgttgaaattaaaattcattttagatatcattgctctgtgaagcctttcgtcactctacccagatagagtcagtcacttcctgggctatttttgtacctgaaatatatttgaaattttatttcacttactaagtaggataattagacattcacttgcctttctcccctgctagactgtgagtccttcaatgtcagcgacagggtcttattcatatctgtcttctcagtactagtgcagtgcctggtagacaatagatactctaaatcaggggtccccaaccccctgggccggactggtactgggcaagcattaccacttgagcttcccctcctgtcagatcagtgggggcattagagcctcataagagcgcaaaccctattttgaactgtgcatacaagagatctagattagatttgtctgtttagactatccttttaaattaatgaaggatagccactttatagtaaattaaccaaggatgacaattgtcttacagtgcttaaaatcagggactttgtaagagcttaaatgttgtctgttcagtctactcttcatattctcatattcttagaggcccagagagattaagtggtccgattcacactgcaaattggcaggattaggattatacttattcagattgttcaactctgtggtccatttttctttcactagaacaaactgtttaatcttttaaacattctcagtgtacatatttcattcaacaatagattattttacttccaaaatcttttgttaaatttagactcgtgggattttagagctgtgaataatttgcagattagccagtaaattttgttaaccccaactcttaattgggagtgacaagccaaagcaggtgaaaaagggatttttttttttaaactcgtataacctaaaagcctcagtactgctagatccagatactcacatggcttcagaaatctgtttttctttctttctttctttctttttttttttttttgagatagtttcgctcttgttgcccaggctggagtgcaatggcgcgatcttggctcgctgcaacctccacctcccaagtgcaagcaattcttctgcctcagcctcctgagtagctgggattacaggcgtgcaccaccacgcccagctaattttgtatttttagtagagttggggtttcaccaagttggtcaggttggtcttgaacgcctgtcctcgggtgagccacacgcctctgcctcccaaagtgctgggattacaggtgtgagccaccatgcctggccagaaatctgtttttcttcatctgtaggttcttgctttcctccagattaaattcatctttaaactgacattcaaccaaatgcccagctccaaaggaaagaacacatttttgccagtagtctcagcaaaaatctcaaggctagctgcctttgactttgcttggctcacctttgtatcagtcaacttttaatcatgtagtcaggactaaattatcttcccactcctcgatactcctcaaaagaaaatgagcgcctcctaaagaagaggagctggttgctaggcacataaaacagcaatgtccattacgtgaaattcacattgtctaatctgcttgaccagttgaagtcacagagataatttattcaaaattgagtgattttcctaaactaatacatagttcagtgaatgtaagagttgggaaaagtatcgtattttaaagatgactacacccctgccatgggatccttgtttattgaagccctgtgtttttctctctctaactcaggcctagagcaataaatagtatatgaatgtctaaaaaggctagtaagcttggaaaagattatgtagatgtttaatgtatttcacacagctactgtgtgaaactggcgtttatttgttgtcttaaaagaactgcttgcattctagatttttctttctgctagaacatattgccaatcccatttgattgaagagggaaatcactaaaaacagggaatcacacaaactcagaatacactatattaagctaactacgcattgtatttagtttcacagatacttgtaactaaaaaggattccttgttagaaagttacatgtagaaaaaaattgtttcagtattgagaagttttttagtccctatttatttttgcttttattagtttaaaacagtttatgttctgttatggacctgattttgtgtttttttctaataaactttgtatcacagcttatcaggagtaaattaaactgtatatgcttttattaaatttatttaatagaaaaactaattaaatctagcaaggcatcttagaagtacaaaatgtcagtttgggccaggtggcttacagctgtaatcccagcactttggaaggctgagggaagcagattggattgcttgagctgaggagtttaagaccagcctaggcaatgtagtgaaacctcgtctctacaagaaatataaaacttaacatggcttggtggtgggtgacatgatcatggttcactgtggccttgacttcccaagtccaggtgatcctcctgcctcagccgtgcgaatagctgggactacaggcatgtgccaccgtgcccagctaatttttgtagagacagcatctccctatgttgcccaggctggtcttgaattcctgggctcaagccatctgcctgcctcggcctcccaaagtactgggattacaggtgtgagccaccacgcctagcctgagccctattttgttttccagcttcatcatcctctagccacacaggccttctttccatccccttgacgctctgtcgtttttctttccatggggtttttgcacttgttaactgttctccttgcttgttaactgccattgatcctttacatctcagtatacaaaacacttaaggatgctttccctaaccttccatttttaggttaaaactctcttttataccctcagtggtaccatatacctttcctttgaaggactaaacacaggtatatgattccgtatatttggccaattatttgattactgtttgcaaagttcaatgaggtcagagacaaggctgattttctttcctattatttcgccaatgttcaacacagggcctaggaggtagtttgttcgtttttttcccactaagcatttgttgactaaatgaatctatttatttggttcagctttagaagcatttaattcaaccatttaaaaaagtatagtctaggctaggtgcggtggctcacacctgtaatctcagcactttgtgaggctgaggagggaggattgccttagcccaggagttagagatcagcctgggcaacagtgagactctgtctctacaaaaaaaaaaaatagccaagcagggtggcacatgcctgtagtcccagctacttgggaaactgagccaggagcatcacttaagtccaggagtttgaagttgcagtgagccttgatcatgccactgtactccagcctgggtgacagcaagaccctgtctcaaaaaaataaataaatttaaacatagaaataagaagtatagtctagttctgtagatgattatttaatcttgaactttgtttccacttaattttttaggctattactgtcattggggccttaataaatgaatatgtctcattccacttgttctcttagtttgataaattgtgaatatattaatattgccttatatttctaaaaactttaaacatatactttttttattactttatataaagcatacagctatcctgtgttctgatatttccattttacagattaggtcacagattcagaggtggtaacgtatccaaggttccacaggcagttataaacttaggtcaggctctgaattcatgtcctctttaccacaagacagctgcctttctttcagtggtgacaaagtttcgagttttatttaaaaagttacgtatttctcagcaattatatgattttatgtaacagagtaagaaaatatgcccttttgttgctaatattctatagttcaatgaaatatttaatgatttcattaatattttgactaaagctgcttttttaaaaaacacatttgtgttaactgagtctttattaacaaagtaattgtggttctttttattttacttctttagtccgaggatcagaaggactgtacatggtgaatggaccaccacattttacagaaagcacagtgtttccaaggtatgatttattttgttaagtaatgttatagggaacatacagtacaatctaaaatggttttgttggtggtgtattttgaacaagaaaggaaaagaacagatgaactcatttttattgtataatatttaccgaagatgaaaagaatacatattctctatcaaggaaaatgatcttcagatctgaaaatagtaacttaagcctatttataaggtagggggaacaatactaagaaaaagtgtagacactagtgtaattgaatacaagcctttattttacaagagttgtatcttaaggaatgagaaaaacttgcaaatttgatagccaaatcatggccagtaatcttagtgaaatcataatgaaaaagatattaaaaagggaggacatatatatgcacatagtatatagctagctagattaatttttttttccccaaagaaacaatggacaagtaaaccaaaaactagttaaaaatgcttatctatagggggagagagttacagaatgcgggggagagagttacaggatgcaggggacacatctgtgaaagagctttggtatagttttgactttggaccatataattgttttaaatttaaaaattaaattaaaagctgggcccggtggctcacgcctgtaatcccagcactatgggaggccaaggcaggccagatcacctgaggtcaggagttcaagaccagcctggccaacatggcaaaaccccatctcggctaaaaatacaaaaattagccgggtgtgggggcaggcgcctgtaatcccagctactctactcgggaggctgatgcagcagaatcgcttgaaacccggaggtggaggttgcagtgagccaaaatcagggcattgcactccagcctgggcaaaaagatgagactccgtctcaaaaaaaaaaaaaaaaaaaattgggaaactaaaataagtgattctagctttatatcaggttggtggcataaccatgtgaagacctgcaaaattctttttttttgagactgagttttgcccttgttgcccaggctagagtgcagtggtgcaatctcggcttaatgcaacctctgccccccaggttcaagcgattctcctgcctcagcctcccaagtaggtgggattacaggtgcctgccaccatgcctggctaatttttttgtatttgtagtagtgacagagtttcaccgtgttggccaggctagtctcaaactcctgacctcaggtgatccacctgtctcatcctcccaaagtgctgggattacagacgtgagccaccatgcctggcctaatagttttctttttaactgaaagttgatattgtcatttgaatctactataggatagagtaaattaattgtattaatgttgttaggcaccaagatttttcagcattagagtgaaaagatagacttgcctatatcagtatgaactcatgatttcctttcataaaacatttgcatttcctagttctggccaatgaaaaggcctggaagcagtgataacacagtagcagtgaataccccatcctcacagattgtgatctctaaatacaattcttcactaaaaggaaccacttccttggagaagtggtcaactctaggtctgggacagaaaatgtacaagttgaggtagcaacttttgtgccagaaagcaaagctataaaagactaatgagattttgttaaagggtcgtaggaagcaacttgaagagattcacaccaacctaagatgggaacattaagaattatgaatagaaagataaagcatgtcaagtatataaatgctcccccgaaaaatcccccctccgtttaaacctaactggtcagcattggtggttgatggagtcctcactcattactttgaaaattgataaataaagggaaggagtcaagcatttatcttgcctttcttatacaaactgtttctcagagtaaccaagtggttgatgagaaaaagaattttatagacgaattccagttaataaatggagaatggatgctggatcagacaattaccattttgtaatcctcaagaaatggatctaggccactggttctcaaactttaccaagcatcagaatcatctgaaaagctcgttaaaatccagattgcagctctctttccaaatgttcggattcattagatcagcggtagggcccaataatttgcatttttaacaaattccccagtgatactgatgctgcaaatctggggacccccctttaagaaccactgatctaggcagatgatcatcaaaagatgctgaaacctttagctgaactgtttgatgactgttaatggggaactttataatcaggctgttgtcatctgactctactgaccaatttttattaggcccagttctctagaaccttgctacaggaagcatgggcccaaccaagaccaactatattggcatcactcctgagccagtacagaaatgcatctcaggccctacccaacttactgaatcagaatctgtattttagctagatcttcagatgatttatatgcacttttttttttccagagtcttgctctgctgcccaggctagaatggagtggtgtaatcatggcccactgtagcctcaatctcccaggctcaaacaatactcctgcctcagtatcccaagtagctgggactataggcgcatgccaccatgcctggctaatttttgtatgttttgtagagatgggggtctcactatgttgcccaggctgctctccaactcctgggctcaagagatccaaccgccttggcctcccaaagtgctgggattacaggcctcagccaccatgcctggcctgtatgcacattatttatttatttacttatttatttattttttttgagatggagtttcactcttgttgcccaggctggagtgcaatggtacaatctcggctcactgcaacctctgcttcctgggttcaagcgattctcctgcctcagcctcccaagtagctgggattataggcacctgctaccacacctggctaaatttttttatttttagtagagacgtggtttcaccatgttggccaggctggtctcgaacttctgacctcaggtgattcaccctccttggcctcccaaagtgctgggattacaggtgtgagccaccacacccggccatgtatgcacattaatgtttgagaagcactactctagaaaacccagtctggctgggcgcggtggctcatgcctgtaatcccagcgctttgggaggccaaggtgggtggatcacttgagcccaggagttcaggatgagcctgggcagtatggcaaaaccccatatctatttaaaaaacaaaaaacaaaaaaaaaactatggcaaagttatgtgctacacttcattagggtatgcagtcccaaggctgcaggagtaggggagaaagggaaatgagacagggaaggagttaaagcaagtatgatgggatatactgaggtgaccacaaatccacaaaatatagccaacttgcttggtcatgtgtgcaaaatttttgtctccagaaaggctgtatggaacatttgtacttcagaacagtctgttgtgtggagacagggtaagaagtttactacagcctcttagcctgtttgggttgaatctgagtgccagagctcctccatgtgctgccgcagtgcatggtggaagccatgtggaagtatggcccttaactctgcagattcaaagacaaccagtggcgttaggagatgaggtctcttcattgaatagttgaggcgtggcagcaggaagagttaggtagatacaaggaggcacatgactgaatccagtacaatctcagtatcactaagagtagaacagagagatatttatgtgtctcctggtgagttattatacagtaggaactgtgctgtacatatcttctacgaaagttaaaaaaacttcaaactcagaatttagtcagtcttttacatgagtagttctcaaatgtggctgcacaatagaatgacctggggagctgttaaaaaacccagatatccaatccaagtattgggtattaaatgatattaagaagttaattttgtgagatgaagtggcatggtggtgattatgtttttaaaaaaatatactcactggttagagatgcataatcaagtatagagcaatatgataatgacatctagtttttgcgttggaatgttgtggcatgaaagataaaagtggggaatagataaaattggctctgagttaatagttacttaagcttgatgatgagtgcataggtggattatcatactttttctctattttttgtgtatgtttgaaatttttcattcaaaaaattataccagaaggaaagaggcaaaatttcccaattgccaagaccaagaaaataatcgaattctggattctgtagtttagtaagtttataatcattgcgataagggggtgtttattaagtcaaaatgagcttcctaagaacaaattgtttcaagcttatctcgtttcctttctgggtagaatttccagacagaataatagaatacacattagaataatagaactgtaaacataattttggcaaaatatctgagaaatgagaaagtctttgggttgcatgatgatgacagaattgtcattggttaaggtcagtaaagtcagctgattaatgagttagttttaatttgagggaaggactgttggtgagccacaggatcttgttcagagctcactgaacagtcttataaataatttagatgatagcctagtaacagttttataatttatatattacatacttccgtatgtaatgtaaggactgactaatgttttaaaagagaaaatcaagatttaagtaggcctcagtaggctgaaatgataggccaaaacctgggtggaatttaataaagataattgtaaaattctgccgtaaggttcagaaatgagttgcataagtgtagggtagtataggatggggaacatcttgatcatagctgtttatgtgggaaagattttttttatttttatttttttgtgtggtggagtctcactctttcgcccaggctggacagtggcgcaggggttcactgcaacctctgcctcctggattgaagcaattctcctgtctcagcgtcctgagtagctgggactacaggcgccaccaccacacctggctaatttttgaatttttattagagacagggtttcgccatgttgcccagctggtctcgaactcccaacctcaggtgatccgcctgcctcggcctcccaaactgctgggattacaggtgtgagccattgcaccatgagaaagagattttaaaaatgttttattatctataaactgagtgtaagctgtcattattgtgtgattgcagaagcacaaatgtcatcttcatttgtgcagatgaattaatgcaaagatagtgtaagggatgtatcagtcagttctcaatgcttttgttgttatttagcaattcaaattattttttagccaggaagttctcatctcatgttgtgactacactaatgtacatctacatgtgcacagatacaagtttctatttgggtattcattatcactgggtgatgtattcatagtaaacatcttcacttcggagatacagtacttagagttttgaatacttgatagaatattcccaagtagttaggtgaagagcctcttatttttgttatactttctatctctacacatgagaaattgatggaaggcctaccacacaaacttattcacccaaaagggctctatttttttcttaaaatccatctgttagtatgaaatcattttccagcttactttacagtgatagcattgcattttaaagtattttggcagatgaaagcattttggaattttctgaaatttgtgcaagttcttagttattaaattgatagtgaaatggttgactttataatcagatttttttgaaaagtattaatgcttattcatttaaaccttttttttttgtcattttcagggaatctgggaagaattgcaaagtctgtatctttagtaaggatgggaccttgtttgcctggggcaatggagaaaagttagtgttcatttacataacatattttgtgtgtcacgaatataaacacaactggcattatttgaataacagatatttgagtgtcattaataaaatccgtcttttaatgtcatgatgtagtgagatattacctctcgttacacaaaataccttcaaagttgttcatttctatgtatatgccatgacttgtttatctagttacttagaattaaaaattaatatatgaaaaatataatttaatgctaaagaagttgagttgttttaaacagtgctctaagttattggttggagtttcctaaatctgcagtaacactgagaaaataattctctttactcatttaatcctagatgtagatacttttttacctttgctgttaaattactaacaactgcctgcagttattattattagtcttatgtatataaaagtgtatgttattcaaaagaacgtttagtataatatatgttacataaaataccagtttacaaaattggtcttgcacaaaaaattatgttgattaaatgcttatattttattaagaaaaccagtcctttttaatttttcaagagttactacaacattttatttcatagaccatgcaaatgcccaaatatttgttgcttggcttaaagttatctacattgttctaaaccacatataatactgttaggtttttcaaaggggagaaactgcatgcattagtttgaaaagtaaattttaaacattgttctttacaatggtaatgtattcagaagtgtttaaactacccattaatacttgctttttaaaaattgactactaaagagaacatgttgaattagttgattcaccttttatgactataagtagctggcagaattagcttttataattaaaaaaaattggtcttttattctttttcttttttcaattttaatagagacagggtcttgttatgttgatcaggttaggctcaaactcctggccccaagcagtcctcctgcctcggcctcccgaagtgttgtgattataggtgttagccactatgcccagcccttttttttttttttttttttgagacagggtctcactctgtcacccagagtggcgtgatctcagctcacagcaacctccgcctcccaggttcaagcgattcgcctgcctcagcctccccagtagctgagactacaggcagacaacaccacatctggttaatttttgtatttttagtagagatggtgtttcaccatgttggtcaggctggtctctaactcctgacctcaagtgatccacccgctttattcagcctcccaaagtgctaggattacaggcatgagccacctcacccagcctgaatctactactctcaaatcattaataatataattataatgagtcttatctacaatgttaacagttttaatctcagcctcaaaaagtaggatgtgatctcaaaatttcttactctttttttgtgtaacctattgtgggtacttaaattttattttttaatccatattttagtttgtagtatttgagtaatgaatcaatagaaatttactacctaatgggctatactatacttcttttcattgtctttttttgtttgtttgtttttgaagtattccttgttcttctagcttagagtttgttgaataagtctgtttttaccttggcagttattgttaatagttcactcatatccacacttaaccttctatgggattcaactctgaatctttttagtatgtccccatatgtcatgtccatgattttaatagatatcttctatattaagttctagcatttatttcattaaagtgctgtgaccacaatggtacttattgttctggggcaagagaactagatttcatgtattgattgtggtctttgttcagtttctggttaactaagtcagaaaccgttactgattcttccttaaatatgttttttcttaattaaaataaacatccttcattaaactaagaataactcttaaagaccatcaattctgagtaggctccagttgcaaagcaaagaaaaaaataaaggttaacaacagcaacaagaagaaaacaagaaagcgtcttgtaattctaaaataggttatttgcagcaagttgtaaagatttccatgttaggtgtgtgtgtttaaatactatgtggtaatttttcattcttttcagtgactgcttatcttaacctcagttatcttcctcaaacctgagtagaacaaagttacttacagcaacttctggaataagatggagagtcttttttttttttttttttttgttaaacaccccagagtgtttagtacataacagtaagtcaggccaaactgatttcaaagcttggctgtggcatttatcaatagtatgatcttgagcaaatcgtcaaatcattttatttttctaagcctaaatttcagcacttgtaaaacagaaatgatgacatttgtaagattgttgtaaggattaaatgagaaaatgtacataaagtggttaggtacatagaaaacatcccaaaatggaactgcttttatcatacaattattgtcatttttgtcattgtaccataataattcttagaatcatatcttttagagattgctcttgagattgtagtagacatcaaatgtctccttactgatttccctagctgctatagcttctatttatttaaaaaaaattttttttttaattgagatgggatcttgctatgttgcccgggctggttttgaactcctgggctcaagcagtcctcccacctcagcctcccaacatgctgggattacaggtgtgagccactgcacctggcccatttattcaaatttaaaagtatacttttgcgggccggacacggtggctcatacctgtaatcccagcactttggaaggccagggtgggtggatcacctgaggtcaggagttcaaggccagcctggccaacatggtgaaaccccgtctctaccaaaaatacaaaaattagccaggcgtggtggcatgcgcctgtagtcccagctactcgggaggcttaggcaggagaatcacttaaacccaggaggtggaggttgctgtgagccaagactgtgccactacactccagcctgggtgacagagtgagactccatctcaaataaaaaataaaacaaaagtatacttttgccattttctctagcacctctgcctttcctttggtttgatagacctcagcttctctatagattagttttgtgttcacttaaaggcatttttttccttttcagctgaaggtggaatcatccatgtgtcttctattttatatcatttcccagcactagccttatataggagccttttggtaaaatatacatttttttttttttgagatggagtctcactctgtcacccagcctggagtgcagtggcacgatctcagcccactgcagcctctgcctcccgagtagctgggattacaggtgcccactgccacgcccggctaatttttgtagtgttagtagagacagaggttctccatgttggccaggctggtctcgaactcccgacctcaggtgatccacccacctcgacctcccaaagtgctgggattacaggtgtgagcgactgcacctggccctttttttttgaagttaaggtatttcccgcatattttctagaaccaacttaaagttgatttttatgaaaaatgaacattttgggctgggcatggtggctcacgcctgtaatcccagcactttgggaggccaaggcgggcggatcacgaggtcaggagatcaagaccatcctggctaacacggtgaaaccccatctctactaaaaatacaaaaaattagccgggcgtggtggcgggcacctgtagtcccagctacttgggaggctgaggcaggagaatggcatgaaccggggaggtggagcttgcagtgagccgagattgcgccactgcactccaacctgggagacagcgagactccatctcaaaaaaaaaaaaagtcaacattttggagtgatctgtatttgaaaagaggtatgaatgttttggttagtgttgactactataaaacagtatttcattgctgaaataatttcttttgaaaccagagtaaatattatcagtgtcactaacaagggactactgcactccttcgacctcctgaaggcagtttgccttgaattctcacccaaaaatactgtcctggcaacgtggcagccttacactagtaagtattttctcagtgtaaaaatactctgacacgatcaattacgtttagtgggggggaaaaagttataaagtttataacctcataagaaagtaattagtctttatgatagtaaatagtgtttgtgaatatttatgatctacagtgaatcttgtactctccaaataaacaatgtattgaaagtaatttcaaggtatatggtaagttaatgtaaagagccattatgagctaaaggaaaagaaaaagctcaagggaaaattcaggaagtaaataactgctggatagagatttctgaagattaagaataataatgacttttaaaatcaagacttttaaataattattatgtgaaaggaagtacagtagacaaaacatctaagggatgtgtatggtagagtcgaaaatgttgtgccattttccaaaatatttaaagagatacttaatgataatacattatatgaacatttcatataactgtgtttcatgtaataaaatagttataggggcttattttaagaaacattttctaataatgttgatatttttgaataagtaaatgataataggtcattattggcttacaaacctcctgagtttttgttctttcaagaggtatgaactctcatgaatctaatttttccaagtaaatgaaagagatactgagaatcagttgagaatcatgagtgggttatgtaacctttcatttatttatttatttattttggtaacacagaggcaagctttcatgatttaacccatttgatagtaatccatatcaaacttaataaataagaaaaataatccctttacaaatgttacaaggcaattactgaaaaaaagaaattttattgcagcttctaaagatggcacagctgggatacccaacctacaactttatgatgtgaaaactgggacatgtttgaaatctttcatccagaaaaaaatgcaaaattggtaaataaatggcttaaaatactaattttttacatagtatttttaatgtcatcactgtataatatttgttttcctgatattgatttaaaaaataacttatcagacaaaaatctacatttttaaggattttgtatgtaggaatgtaatagagcaaaaacttgatccttctttcctttagtattaagtggaaaggaacaatgttttcttttttttgtttgtttgagagggagtctcgctctgtcacccaggctggagtgcaatggcctgatcttggctcacggcaacctctgccttctaggttcaagcaatttcacctgcctcagcctcccaagtagctgggactacaggcacgtgccaccatgcctggctaatttttgtatttttagtagagatggggtttcaccatgttggccaggctggtcttgaactcctgacctcaggtgatccacctgccttggcctcccaaagtgctgggattgcaggtgtgagccaccgcacctggccttttctattaacatatattgactaaaactattagtaactgacttaatatcatatttataagtgtttataagtgtttttccttaaatggtaaccaatatcataaattactttaacatgttaatgtgatgttacattctgtctgaatattttttatactttttttttttttcattgacataggtgtccatcctggtcagaagatgaaactctttgtgcccgcaatgttaacaatgaagttcacttctttgaaaacaacaattttagtatggaaagatttatgacataattttattacttactgtaatcgtatacagtttccattaacttttatgacatcatagggttttcctaaatactgttaatctattaatcaataattactcttacatacatttgcataattctttataagtctgaattcagtgaaaatctgtaacacaaaggttttcttttacaataactttttattatctggtaattgctattaagacatttgaatatcttttcctgaatttaattgctattgaaattctgtgacacaaattttttagatattttatcgtgtagaattttaaacttcagacacctagttctagtaaccatcagcttgtggccaatcttatctcatccatacatctctccagctaccatctcttactaagtgaaagcaaatcccagatatggttatacttttatatacttgttaaatatgtaattgtaaatatttcagagtagatttctgaagattggggcctttcattttttaaacttagccacaaaaccattatcacaaattattaaatatgtgttcaaatttctactaattgcaaatgttacaattttttttaaaactcgggatccaaataaggtactgcacattgtggttgattgatatatcttttatgtttcttttggtcctataagttcccactctatctgttattttattcttcataatttattgtttaagaaacaaggttatttgtctttcacgttttcccatagtttgaattttgcttttgtatcccatggtataatttaacatgttcatctgtcccctataaattgcaagttggctctagagtttcagcttcaggttcttttttaggtgagtaagggtaagactacattataaggtgatgttcacttcttttatcaagaagcacataatgtctggttgtctttaattttgtaggcttagctgacattaatgtttcatgcctggatgcattatttcatcagtggttgcaaattgttgatactctggttttttctccctcacttatttttcagctgtactgcttctataaagaaaaatttccccttctactatttggttacctagtgctgcatttatatagaaaaggcgggataaatattcttgctcttatcagttttaatataatgtattccacctctagcaaccttcattgtaaccaattagctttttccccattcttgtttttcgagagtgggcctcattcttttgtccaagctgagtgcaatcatggctcactgcaatctcgacttcctgggctcaagcaattctcctgcctcagcctcccaagtagctgggactacaggcttgcaccaccatgcccggctaatttttgattatttgtagagacaggatctcattatgttgcccaggctgttttttagttccattcttttttttttttttttttttttttgagatggagtttcgctgttgttgcccgggctggagtgcaatggtgcgatctcggcttaccgcaacctctgcctcccaggttcaagcgattctcctgcctcagcctcctgagtagctgagattacaggcatgtgccaacatgcccggccaattttgtatttttagtagagatggggtttcgccatgttggtcaggctggtctcgagctcccgacctcaggtgatccacctgcctcaccctcccaaagtgctggcattacaggcgtgagccaccacgcctggcctttttagtcccattcttaatgagctgtggatttaaaaggtatgtgtttcagtccattgtagttatttttcttattgatgctcaaattgtctcatctttgatcaattaatccttagtgacttctttgctatatggtaagacaagtcattctaggattaatttgtacatttctaaccattacacctagaactggctaatttttcaggaaaccctgtcgcctttttggtgtgctacttttgaatagctattgatctctgaaattgaacaaagaaaaagtattagctcttgatctcattgaaggaaacattaaaaggtaatagggtttcttgaaaaattggctgagtctagcaaaaaaaaaggtatttaggttctagagattcttatttgctgttgcattgatcattgtttctaggccttttttttctatttaaaagatgtaacaatcataattttatttaaattaaagttttatacgtatagttttatttaaattgaagactacaaggtttttatttaacttctatcttatttgtattgccttctgtcaccaccaagaatcttgttactctggaataccagggatgataatttgagaatatcacattcacataagtattcatttggtttgttccacattatccacaaggtattcttacaatcttaataccaaaaagtaacactgttactgaaaataattttttaaaaagggtttgcagttcttttgtctttagagcatcccattactgattgtacagttttgagtatatcatagttagaataggaattggtaactttgttcacacgtaccaaagatggcatgtaggctgattttgagcagcatccaatcagtatagttatgcattttattttcctgtgtttgaggcgcactgtcacctcactgtttctgggttagcttgctttcttgtcttattctcctctttgtgagcatgtcaaatgaagagggatcaccactttgacagtttggtgtgctgcttttgaaaagccattgatctctgaaattgaacaaagaaagtatattagctcttgatctaattaactagagtggcagttttattaataatagcatggctcagactgcctggaatagagtaagctcttaatatcagccattgttactgtggttgtgatcatcattatcatgcatctgtttatcacattaagttacagaatttccatatccacattctgcagtagcaggccaaggttgatcttttccttctaataggctctaagaccactttatttcagcgattgaagagaggataactgacatttatcaaatacctaccatgtgcctggcactcttctcttaaaaccaattactgagagttgggtggtataatcccattacttgcctaagctcacactgcaagtaaatgactgagtagaaattgaagcctacatttgtcttgctcctaccccatgctttttccactgtgttactgtatctcaccaggaggagactacagtgagtagtattggtgtgtagttatagtgatctttgataatgtattcagagtttaacatgttccttttaggttctctcatcaatctgatttaatttactcttttttttagacacaattgcaaataaattgcatttgcaaaaaattaatgattttgtattatcacctggaccccaaccatacaaggtaattgctgtttttgtttatgtgtaatattatgtgtttaaaccttttcctagttttttgtgattgtaaaaacatgtccatctcagtttttattcttcaaaaaattaagtaatgatttatgtctatgtatcttaggtggctgtctatgttccaggaagtaaaggtgcaccttcatttgttagattatatcagtaccccaactttgctggacctcatgcagctttagctaataaaagtttctttaaggcagataaagttacaatgctgtggaataaaaaaggtatgttaagtatattttatccctccctttgtttatcagttgttaatttaggctatattcctatgtgtataacagaagaatcaatgcccatttgtgttttaaatctaattaaagtttttactgttatagctactgctgtgttggtaatagctagcacagatgttgacaagacaggagcttcctactatggagaacaaactctacactacattgcaacaaatggagaaagtgctgtagtgcaattacgtgagtattccagcagtcttcctttgattagaaacaatgatagtaaaaaatactatgccataaagatgatataatctaaattcttgatcaaaagatagaattcatatgccttaataacctttaagataaaatttttcttaattaagaaacttaaaaatcatcctccaacataccttattttggcagaatacaattagttatttgagttacgccatcgttttagaagtgaacttcctgagtaaggtaattccattgtagtagctcttttggaacttacttagctaattatgacggcaaattgcttaatactgtctttagaattgttagtaatatgcaagaggccaggcatggtggctcgtgccagtaattccaacacattttgggagtctgagatgggaggatcatttgaactcaggagttcaagaccagcctgatcaacatagtgagaccctacctctacaaaaaatagaaaaagttagccaggcatggtggcgtatgcctgtagtcccagctcctcaggagactgaggcaggaggatcacttgagcccagaagttcaaggctgcagtgagctatgatcatgtcactgtacttcagcctgggtgaaagagcgagaccctgtctcaaaataataatatccaagaatgttaccacttcatctgttgttttaatgaactaaaactttaaaataatagttttaaaatactgatagcgtcctaattttctcattttgaattgaacatgtgtaagtagggtaatctatgttttaaaaaaactatttccattgaagtcagagaaaaaacaaggatggctccccttttcactttattttaataacattctgaaatacctagtcactataatcagcagaagtaaaatatatacagttttgaaagaaaacaaaatcatctctgctcatgtagatgaagtcacactataacagctactttaaaaaaatgaaagattccatatatagcaaaaataataagaacaaatatatagggccaatgagaagaaaactttaaaactcttcagagagacaaactatgacctttactaagaagaattatttttataaagatgtcatttctctcttgtcagtctaaaactaaatttaaatgctaactgattttttttttttaactaaataaactggctgtaaggttggtgttgaaaaatgaacacacaagaatattttggaaacttgtgtaaaagaagagcagggcaggggaagttatctggagttctgacactaccagatattaaaatgtacccagcactttgggaggttgaggcgggcagatcatgaggtcaggagatcaagaccatcctggctaacatggtgaaaccccatctttactaaaaatacaaaaattagttgggtgtggtggtacatgcctgtaatcctagctactcgggaggctgaggcatgagaattgcttgaacccaggagtgggaggttgcaatgagccaagatcgtgccaccgcactccagcccgctgacagggtgagactctgtcacaaaaaaaaaaaaagtaagccaattgtaattaagacagtttggttgtggtatatggatatactggtaaaactgataaatcagtggaagagaacagagtccagaagtagatccatacttttgtagacattaatatataataaagtcagcatttgaatcaatggaggagaaaatattgatcatttaatatgtggtttgggataactggctagccattcgaaacaaaaggttattatcttcttcacaaaataaattctggttgggtcaaaaacttatacataagactgcagaggaattagaagaatatatgggagaattttttttctaatcttaagagtagaaaaagactttttaaacaagatagaagtactaaggggaaaaaataatgaatttgactagagaagaataatggattattacaatgagagaagaaaagagtccataaattaagcaaaatgaacaaaaagttggggaaaatatgttttttaaatagtcaagtgataagtatgaggaaggtcaaattttcttaatatatcaagtaagccaagtaaaagaccaataattggagaaaaataaaataggcataggatagtaaaaattagtcctcagagccggtgcagtggctcatgcatataatcccaactatctaggaggctgaggtgggaggattgtatgagccgagaaatttgaggctgcagcaagctaagatcctacggctgtactgcagtcttggtgacaaaatgagaccatctctttaaaaaaaaaaagaagaagaaaaaaaatcagcccatagaaaaagaaataaaattacttacagtaaaagatgcttaacttataatttaaaaaatacaaatgaaaacaagatagacattttcacttagtaggctgatgaagataaaaatatgaaactacacagtatagttgaaggatagtgagggggaagcctgcatcatcaaaaactgctgacagaggctgggcacggtggctcatgcctgtaatcaatcccagcactttgggaggctgaggcaggtggatcacctgacgttaggagttcaaaaccagcctgaccaacatggcgaaaccccatctctactaaaaatacaaaattagcccggcgtggtggctcatgcctgtaatcccagctactcaggaggctgaggcaggagacttgtttgaacctgggaggcagaggttgcattgagccgagaccgtgccactaaactccagaccgggcaacaagagtgaaactccatctcaaaaacaaaaaaaaattctgaaaggatatccaagaaatataacagagggttgcctttgtgtaaaatgacctgtgtttgtggctttttttttgagatggagtctcgctttgtcaccgaggctggagtgcagtggcacgatcttggctcactgcaacctctgcctcccaggttcaagcgcttctcctgcctcagcctcctgagtagctgggattacaggtgcatgccactgtgcccaactaatttttctagttttagtagaggtggggtttcatcatgttggccaggctggtctcaaactcctgacctcaggtgatctgcccaccttggcctcccaaagtcctgggattacaggcgtgagccatcgcacctggtcttatgtggcatttttaaaaatatagggcccagtggctcatgcctataatcctagcactttggaatgccaaggcaggaggatccctttagcccaggaagtcgaggcagcagtaagctgtgatcatgccactgcactccagcctgggccacaaagtaagatcccatttctataaataaataaataaacaaataaataaataaattagtttgtattttgattaccatctgcacgtattaccccttccaaaaacaaatttattaatagtaacaaactattactataaggccatattaccaaaatgtttaaaagaaattaagattcaataggggttcttaaataaatttatgattatacattaatccccctagtatataatgtaagagtattttaatgttaacattccttgaaatttttttatctgtttgatgtgtttgtgagtactatatgatggtaacttttgctaacaaatatttatatagttctttattgctaatttgggctttatattctttttctagcaaaaaatggccccatttatgatgtagtttggaattctagttctactgagttttgtgctgtatatggttttatgcctgccaaagcgacaattttcaacttgaaatgtgatcctgtatttgactttggaactggtcctcgtaatgcagcctactatagccctcatggacatatattagtattagctggatttggaaatctgaggggacaaatggaagtgtgggatgtgaaaaactacaaacttatttctaaaccggtggcttctgattctacatattttgcttggtgcccggatggtgagcatattttaacagctacatgtgctcccaggttacgggttaataatggatacaaaatttggcattatactggctctatcttgcacaagtatgatgtgccatcaaatgcagaattatggcaggtttcttggcagccatttttggatggaatatttccagcaaaaacaataacttaccaagcagttccaagtgaagtacccaatgaggaacctaaagttgcaacagcttatagacccccagctttaagaaataaaccaatcaccaattccaaattggtaagtaaagttttactacttttatagaaaaaagtttattttgggccaggagtggtggttcacatccgtaatcccagcacttcgggaggccgaggcgggaggatcacttgaggtcaggagtttgagaccagactggctaacatgctgaaaccccgtccctactaaaaataacaaaaattagctgggcatggtggcgcatgcccgtagtcccggctactcgggaagctgaggcaggagactcacttgaacccgggaggtggaggttgcagtgagccgagatcgcaccactgcactccagcctgagcaacagagtgagactccgtctcaaaaaaaaaaaaaaaaacaacctttctcttggactaaacaaaacgtatgactggtctgaaacttcttaatttccatcgaaatgttctatttaaccagtattgttttatttatgtaaaattatataaagacataacatgatatttatttgtatttatcatatttatttagatttaaaaagaaagtatatagtagacttcagatttttcctatttctgtattggaattttccttacctcagataaaaacaaaagtaactccaacccatcctgctttctgaatctgtgcatgatggcacaattctttgatccataaaagtagtaggtttattttggtgagggggagaaattgatacagaaaataatactttgaaaatggtgatgaaattaggtaagaacttaaaatcaggatttttttgagacagagtctcactctgtcatcgaggctggagtgcagtggcgcgatctctgctcactgcaacctccacctcccgggttcaagcaattctcctgcctcagccttttgagtagctgggattacagtgcctgccaccacgtccagctaatttttttatttttagtagagatggggttttgccctgttggccaggctggtctggaactcccgaccttaggtgatccacccgccttggcctcccaaagtgctggaattacaggcatgagccactgtacccggccaggatttttttgttaacatttaagatttctactaaattgttgcttttttatgtggcgtgatgattgtgtggtcctgtcaaatcattttagttgaagtagctatatgcccagtaattagaaatgtttacgtgtatctaattccagaaatgagctaaattacaaagaaaatactgtcaagaaattactagaaacaaagacagtgtagtagataacttcacaaaggaggagagttacacagcagtaggggaaaaaaggtgttggggttcgtccctcacagaaaaaagttttttataagtaaaaatttatatataaattatacttaaagaatatttattagctttccaaaaaaaccttcaccttttaaaatgcgttcgttggtccggtgtgggggtttcgatctgtaatctcagcactttgggagaccgaggcgggtggatcgcctgagctcaggagtttgagaccagccagggcaacatggtgagaccccatcactactaaaaatgcaaaacaaatagttgggcatggtggtgtctgcctgtgatcccagcaactcgggagtgttgaggtgggaaattcacttgagcccagaaggaggaggttgcagtgagctgagaaattaaaatgtgttcatcaaaaacagtcccataataattgatataactgaataaacaaagtttattaatgagaatgaaattatgcgtaatgagcacatagtaccaaaaccagaaaaaactcatgatttatagtagttgtgtggatttttttcgtctcaagtgaaaggctctcagtggctacatgatgctcataagcgtggaagagacttgtaacttatcttttcttcttgtatcatttttcatcaaagttctgagcagaaacttttcggccaaagtaaactactacagaagagcccactattgaaagaattttcatattatgtataaaacaaatgttcagcaaatattgtataacttaagtagcattttatgcaacatggataaaaatgaaatgaaagagccttgcactccaaatttgtctgctgttctacaaatgtgggttctcataatattcagtttgtttcaagtagaatatgaacatacccagaactttgatgacctgaaatagttaatgcatttgctaagataaggtcactttatggtttcttatttattactctgcatcttaagtgtttgagctctgctcatttccatatagaacttataagtaaaatgcggatctgagacctagtactcaagaaacttcatggagagctggtacttttgatgtgctgagttatggtacagtctaagagacagttaacattaaaataatagcaatatagatagaaatcagtaagtacctgaatctgatagagagttgtagtgccatcacttatactgtatgttgtctaaaactgttctggagatacattgaatctataattcaccatcttttctattgtggaatatagttgttacatggttacatgaatatctgatgttggaaatgattgtcttcattgtgtaatctgacaagccatgtaatttttttttggtctcttcatatgtcaatcccagatttgtaattatctagttaattactcctttctatttcatttattttcttataatctattcttgttttttcatttgcttttatttttaatcttctaatttctgattttacaagtaaagatctagcaagtaattctttgtgtgaagaaaacaagcgaggcaactgggtttctgttgacaatagttagaaccaaaaaggcctcagaagaagctgttgttggtatctagttttcataagaatcatgtgtctgtagtagtgctaagaaaaattctgtttgaacaaaactaaagtgaattttgccagctctgatatgattgaaagatataggaactaataggaagaccctaattaaatccatcctgacagttggagtgtgccactaccaatgagtttcaaaataatctttgctaatgatcttaaatttgataaaataagtttatcctatattagcagaagtgtataatttgttgttgtaggtgtttacaacatggactccatttcaaaattattttacattttccatagcatgaagaggaaccacctcagaatatgaaaccacaatcaggaaacgataagccattatcaaaaacagctcttaaaaatcaaaggaagcatgaagctaagaaagctgcaaagcaggtatttggggcactaatctcataacaaaacaaatagtcagttatggccgggcgcagtggctcacgcccgtaatcccagcactttgggaggctgaggcgagtggatcacttgaggttagaagttcaagaccagactggccaacgtggtgaaaccctgtctctactaaaaattcaaaaattagttggccatggcttataatctcagctactcaggaggctgaggcaggagaattacttgaacctgggaggtggaggttgcagtgagccatgatcgcatcactgcactctagccttccagcctgtgcgacagagagagactccatctccaaaaaaaaaggcagttaagttagctttaagccttaaagtttaaagaattgtggtcctaaatacttgactgtgaccaggtgtggtggctcatgcctgtaacccagcactttgggaggccaacgtgggagaattgcttgagcccagttcgagaccagcctgggcaacatagtgagacccccatctctatgaaaaattttttgctgggcacaatggcgtgtaccccgtagtcccagctgcttgggaagctgagatggtaggatcacttgagcttgggaggttgaggctgcagtgagctgtgattgtaccacttcagcctgagtaacagagcaagaccatgactcgaaaaaaaaagaaaaaaagcacaaaaaaccttggctcttacgttataaaatgtagttggagttagacttaaataggcagaatatctttcttttgtctttgcctatgaatttctaagtaatcctgtctatatgatgggtgacaaaagaaactggacttgacatcataacctgagacactaatggtattatgtaagcatgttacttgctgtagacccttttggtggcacttgtgtgaagtggtgtagtttgctttccttgaagcatgtatttactaagagaagctggaaattacatgactagaaagccatttgggcactcagtattatagtactatatgaaattatttaactgggaatcgaaataccagaagtacccaaataatgggatatttccaaaatagtttcttacttgattacgtagttgaaaagccacaccagtgtaaataattgacaaattgtgatattgtatagctcatggtgataatgtgattggctgggctggggatgtctggttagtgaagttatggtgatcacatttttgcaattcaggtagagtacatgtctcaatccattcaggctgctaccttatactaggtaattcataaacaaatttattgctcacagttctagaagctggggcgctggcagatttggtatctggtgagaacccgttcatcatagatggcaccttctttctgtgtgtcctcccatggtggaaggggcagtggagctctctttggtctcttttataaagctactaatctcattcttgagtgtggaatcctcatgacttaatcattttccaaatgccccaccttttaatactattacattgggtattaggtcccaaactatgaatttgagggaaacaccaatatgtcagactgtagcagtggggtagggtttttggatgttttgtttttgtttcttttgagacactctgtctcactctgttatctaggctggagtgcagaggcatgatcacggctcactgcaaccccagaccctgagctcaactaatcctgcctcagcttcccaagtaactaggactgtacatgtacaccaccattcccaactaatttttttatttttgtaaagataggttatcgctatgtttttcaagcaggaaatgggagtaggtttttttggtttggttttggcttggtttttttttttgagaccgagttttgccatgttgcccaggctagtcgcaaactcctgagctcaagcagtctttccacctcagcctcccaaagtgcttggattacaggcgtgagccactgtgcccatcctagaaagggcagatttttaacagctggttgctatatcagtatagtcttgctgataattcttgaattttgacaggtctaggctggttatgtgttttgggaggcagttactattttaaggtatagaattgtattatgcaaccatattctgctaaaatctggacttttagaaaaaccattctgttcatttgtagttaatatgtttcatccccagaagtatcttaattggtcagctttaggttattccaagtaaaaatgatctattccatgcatttgatattagatttgtataaaagcaagtcttgtcccttcatcagtacaagtagggacctctactggccctggatattacaactcattagtagtatccttaacaacttgataactaagatgccctttgagttttagggcctctctgaaacgcactcaacttagaattctatttttataagcaaagtttcttccactttatcaaaagatatttttaatatgaccattggtgatactggactaagattcctttatacttattatataaataattacttacataattacatatgattataattattaataattataaccattaattaatatactaaattataattgtattaattatataaataatatacaaattctattagtttatacattttataatataaattatgtgataatttcacatttaattaatataatgaaattattattataaataatagttatttgtaactctgttataaatgtgtaactctttatagctcatggtaatagtgtgatcagctgggctgatcagttataaatttacaactctcagttatatgtttatacctgtcagttttttttaaaagagccaatacagtcatcaagcacctacacacgttttttactaaagatgataccaaaggtgataccagtaatccctcattgtggaattgctttttgagttgtttttccagtaatagcaaaggttttcaacttgcaagataaactattcagtatgtattttggggacgactggctgaagttagtaaaagttgtggctgtgtgatggaacaaag

SEQ ID NO: 598 - protein, 166 aa, Homo sapiens
KQGRRMFPFLSFNINGLNPTAHYNVFVEVVLADPNHWRFQGGKWVTSGKADNNMQGNKMYVHPESPNTGSHWMRQEISFGKLKLTNNKGANNNNTQMIVLQSLHKYQPRLHIVEVTEDGVEKDLNDPSKTQTFTFSETQFIAVTAYQNTDITQLKIDHNPFAKGFR

SEQ ID NO: 599 - DNA, 498 bp, Homo sapiens
  source 1..498: mol_type = genomic DNA
aaacagggcaggcgcatgtttcctttcttgagcttcaacataaacggactcaatcccactgcccactacaatgtgttcgtagaggtggtgctggcggaccccaaccactggcgcttccaggggggcaaatgggtgacctctggcaaagccgacaataacatgcagggcaacaaaatgtatgttcacccagagtctcctaatactggttcccactggatgagacaggagatttcattcgggaaattaaaactcaccaataacaaaggcgcaaataacaacaacacccagatgatagtcttacaatccttacacaaataccaaccccgactgcatattgttgaagttacagaggatggcgttgagaaggacttgaatgatccctcaaagacccagacttttaccttctcagaaacgcaattcattgctgtgactgcctaccaaaacaccgatattactcaactaaagattgatcataacccctttgcaaaaggcttcaga

SEQ ID NO: 600 - DNA, 7963 bp, Homo sapiens
  source 1..7963: mol_type = genomic DNA
aaaagcttagcgcgagtttcctctctacaaacctttcccactgggtaaaaggatgggaacaaacaaaaagtggttctgtgcgttgaaggccagggagtttgccttcgacaagaggaaggtgtgctttgaagttacagcttccgacgaggaaagagacttccttgggcctgtctccaacttgccccagtttccccagcctccgggacgggcgcttccctgcaagctatcagcttgaagagtctttctctctctggcctctaaaatctgctccagccatctcattcctccagcggagggctgagatgactaatgcgccaagggtggacaccgctatggagaccccaaactttgtccccctaaattccggcgaaattacagacaccaggattgattatcacagcgggacgcagtctcaaaaaaaaaaaaaaaaaaaaaaaaaaaaaaaggaaaagaaagtcacaggcgacttgatccaattagtaaatgcctaattgaattagtgtcacctccaccagccaataggagggtctccgggctgtgaggccgggaagcccctccctggccgcaaatatataaagcagctagtgacagcccataagtttccaagtggtcaacttgaccgatgctttggcaattgaaaaagggcagaaaggcgcgggctagtgggtggatggggacaaagatctaagtcaccttcttccagcgtgtgagcctgggaggagggtgggggtcctgaggagcaagaggtacgaggaaggaaaaggagagggcttctgggttagtttccacctcctgctttccaactcacggcgctttccttccggaaaggacgctggattcagggcgcgccagtacgcgcagtagcggcccgcgagtcggcaggtgggtagccccggcgcgggaggaaggggaagttaccttcccctcggaagagggcgctggctcccccatcctgcctttataataaggccaccggaggagaggaagcagccagctgccgtctgcgctttgcaaagcatgcagttaggggagcagctcttggtgagctcagtgaacctgcctggcgcgcacttctacccgctggagagtgcgcgaggcggcagcggcgggagcgctggccacctccccagcgcggccccctctcctcagaagttggacttagacaaagcgtccaagaagttttccggcagtctctcctgcgaggcggtgagcggggagcccgcagccgccagcgcaggggcccccgcggccatgcttagtgacaccgacgccggggacgcatttgccagcgctgcggcagtggccaagccggggcccccggacggccgcaagggctccccctgcggggaggaggagctgccctccgccgctgcagccgccgccgccgccgccgccgcggctgcggccactgcgcgctactccatggacagcctgagctccgagcggtactacctccagtcccccggtcctcaggggtcggagctggctgcgccctgctcactcttcccgtaccaggcggcggctggggcgccccacggacctgtgtacccggctcctaacggggcgcgctacccctacggctccatgctgccccccggcggcttccccgcggctgtgtgcccacccgggagggcgcagttcggcccaggagccggtgcgggcagtggcgcgggcggtagcagcggcgggggcggcggcccgggcacctatcagtacagccagggggctccgctctacgggccgtaccctggagccgcagcggcgggatcttgcggaggactggggggcctgggggttccaggttctggcttccgtgcccacgtctacctgtgcaaccggcctctgtggctcaaattccaccgccaccaaactgagatgatcattacgaaacagggcaggtgagcgcagcgtggaggggcccctgggttcggggataaagggtgacgtgtggtcctggggaaggtccgggatgagggagctgaacccagttgttccgcgcggtgcttagagtgtttcaccgcgcgcaataaatctccgtagacaccgcatctccaatgcggtgtccctctgtgtcagtgccccggcggctcttgcagggtgccaatgttacggctgtacaccgcttttccctcccatcatcctcacctgaacagacctggaggaggcggaaatggaaattagggcatgtccacaagctggattcgttagatcctcctgctcggcggtatgcttgtgcatgcctgcatgccggcaaggagccacggatagggaaggctcaagagctggccacctgagcgcagtagatgggctcccgcagttttaggcgccagggtctccacggggcgtctccgggaggtgggcatgaaggctagagcgccggcctcggaagctcggtcggagtaggtggttagatctgccctggagccagacctggctcgggttcggtgcgcgagaaagttctgatatacatccaactgctaacactggctacttctggggaaagggaggggtgggtgctgagagaggggcactcaaaggggacttttagcctaaagttttaatatatatttttaacaagaataacctaatattgttctctggtacttttcaaaatggtgcatttaaaaattagtagtttttaacattctaggagaaaaattttaagagcgtctgaaagggccgagaatatgagccttcggaagcacgcgcgaatttggaatataccgatgttggggcaagcttttttttttttttttttttttttttttttttttttttttgaaaagacggaaaggttccaagagttgccaactcaaaaatattttacatagtttcagaccacttgatctaccagcattctgttcactgcaaacttttaaatgtgttccgaccctatcccaggtgtctggggaacccgctggggcctgggcctgttctaggacatcccaattaaaatcgatttttctgattctattcccttgcacaggcgcatgtttcctttcttgagcttcaacataaacggactcaatcccactgcccactacaatgtgttcgtagaggtggtgctggcggaccccaaccactggcgcttccaggggggcaaatgggtgacctgtggcaaagccgacaataacatgcagggtgagcagagaagaggctcgggccggggaggaacgggcgggaagaaatcgtaaccctcgactcacacaactcacatttaaatgtagcactttttttttccccttccattctgaggcctagaggtgttagtatgagtgtctttgagttgcttgtttgacggagaggagagtttgctaagtcagatttcttgtctgccaatatgtagatatttagaacctttaactaagacatcaccccaccccccaatccctacgtttaacaaatcagtagtcataagctctccaggtgggaagggctcctgggattctaatgttcacttgagaaagcccagccaaagtttagttcacccataaatatccaactgtcttccatcggatgttgcccttacagctttagaaggccccaaattgaccttcaagagtcatctcttgttagctccgtttctaaattctgaaatgccattcaggggagtccctagtgcaaggaaggttggaagcacaggggcctgggagggatatggatgtagtcctgctggtctccactggcctctttaagcaacttttactgggagaccaactgtaagtctagctcttatatcttgctcatagctaagagacatccctccgctttctccatttgtaaacagccctatatgcttgggttttgtgttttgtttcattttctcttaggcaacaaaatgtatgttcacccagagtctcctaatactggttcccactggatgagacaggagatttcattcgggaaattaaaactcaccaataacaaaggcgcaaataacaacaacacccaggtagagtgacagagcaggaggggatatcttctggctttgactataaggcttttttctaataagagtccctactcttttcactgtatttataatatttgcatttgtgacctgtttgctcgcctatttctaaccatttttgttcttttgacctttctcatcttcactttcttattggatttcgataacagtgagttgactattaagaacagaaatagcgaagtattttgggaatttaggaaaccaagaggaaagcatatctatcacaaccacatacccagctatgatttaaatttcaaaaaaaaagggggggggcaataatgagacctttaaacttgcaataaacaaagctgttagtgaggagcatttagaagtccaataccaaaatacataatttgtcaaaatctaattttgttgaaccactaagaggctttttagatttagcaatttttttctgtactctttccagatgatagtcttacaatccttacacaaataccaaccccgactgcatattgttgaagttacagaggatggcgtggaggacttgaatgagccctcaaagacccagacttttaccttctcagaaacgcaattcattgcagtgactgcctaccaaaacaccgatgtgagtgtcccagacatctcaagaatctctaaagctaaggtccagcatgataaatcactcaatgactgtttttctcccctatctagattactcaactaaagattgatcataacccctttgcaaaaggcttcagagacaactatgattcgtaagtgcagcttttatccacacttgcctgatcatctctgagcaggacatacatcaacaggcactttgctgataatgtattttaggaagagcttttacctttgggatttttacatatttttctttttccaaaattttttcctttactaatcttgctttagatttttctcagaaaggttgtgttaatttctgaagaaatgttaaggacttaaaaatgaagaggtttttttagcatttgagtgaagatttgaaattttaagaatctgcatttatatatacctttcttttcatttgatccatttttttatcctcccaagagcagatattattactctcccccacccccacttttttttttaacataagaaaaaactgaaactaagaggatgtaatttcacaacacgaaatagcaaggccctgctctttttaaaatctgagttttctaccgccacagccagtgttttttccatcacattgacaaaggaggtttgatctgagtttttcgtgttctaggactagtaaaggtagattttctatagtttaaatacttgatgcctaggaggaaactttttcttgcatggtgggaaatttttcccaataagccaagagtccagctaaaatgggccagtgcatctcctgcctctgttctttcagcccaacagaccagcactttcggtgtagataaccaacacaagcctttttcatttctgggaggtggtttgtttggggacaacattagggtttttttttttttttaagtgtttctctttatattgtagcatgtacaccgcttcagaaaatgacaggttaactccatctcccacggattctcctagatcccatcagattgtccctggaggtcggtacggcgttcaatccttcttcccggagccctttgtcaacactttacctcaagcccgctattataatggcgagagaaccgtgccacagaccaacggcctcctttcaccccaacagagcgaagaggtggccaaccctccccagcggtggcttgtcacgcctgtccagcaacctgggaccaacaaactagacatcagttcctatgaatctgaatatacttctagcacattgctcccatatggcattaaatccttgccccttcagacatcccatgccctggggtattacccagacccaacctttcctgcaatggcagggtggggaggtcgaggttcttaccagaggaagatggcagctggactaccatggacctccagaacaagccccactgtgttctctgaagatcagctctccaaggagaaagtgaaagaggaaattggctcttcttggatagagacacccccttccatcaaatctctagattccaatgattcaggagtatacaccagtgcttgtaagcgaaggcggctgtctcctagcaactccagtaatgaaaattcaccctccataaagtgtgaggacattaatgctgaagagtatagtaaagacacctcaaaaggcatgggagggtattatgctttttacacaactccctaaagagttattttaacctcaaaaattagctaactttttgcagatggacttggtggtgttttttgttgtcttctttgcctaggttgccaaaaagatgtttgccttccaccttgatgcatcctgttttgtgcaattctctaaaagaaggtgccaaagctttttgattgctgcaggtaactgaaacaaacctagcatttttaaaaaataagattaatggaagactttaaggtattttaaaattcgaagggtatccaaggttctgtatttatttattggggagacactaacccttcaaagaagcaggctgtgaacattgggtgcccagtgctatcagatgagttaaaacctttgattctcatttctatttgtaaattcttaagcaaatagaagccgagtgttaaggtgttttgcttctgaaagagggctgtgccttccgtttcagaaggagacattttgctgttacattctgccaggggcaaaagatactaggcccaggagtcaagaaaagcttttgtgaaagtgatagtttcacctgactttgattccttaacccccggcttttggaacaagccatgtttgccctagtccaggattgcctcacttgagacttgctaggcctctgctgtgtgctggggtggccagtgggactcaggagagagcaagctaaggagtcaccaaaaaaaaaaaaaaaaaaaagggagaatttaaaagtgtacagttgtgtgtttagatacactatagaataatgtggtatatattgtacaaatagtctacataggtgtctgggataatgtaaaactggtgctttggctttgtaaagaatttgcaaatcacttaacagctgcaggggcaaggggagagtttcatcatccccatgatatttgggaatattctgtttacttcttagatagttaagaatgtattcagctactatgtactaacttgaaccgtgtttaaggaaaactcctatttcatcctcttcttgcgccatcccctctccctaacttggtaatgtgaagaaactaaaacctgataccacagctcctataggcattttagagatcttggatttttatgtacagtcttagtcatttttaataaatgtggttcagtaagggaacggacatagctctgtcttctgtgctgttggggttttcatctttgctttaaagatctcattttgcttcctcctgtatcgttttcagctttaacagtgcctcacccatcccctacctccacggaaggctctagaatctctaactggatactgtagtcatgcgggggtggggatgttttgtttatcttcttttttccttgaagtggaatggggctatttccttaccccactgggaagtctggacaatgggtgttggcggggcgggggaggggggcgggggaacgggggagggaagattgctgccgattgcccacatcagacttaaccaagcctcgaaaacctccgcttctggctcttggagaccaggctctgtcagagcgcctggccactaagttctctgggcttttttctaggcttacttggggccacccatccttaggcccacctaggctccctgggaacccccgtggccctttgagcgcccaccagttcagggtccctggggcgcggcggagcggggggctgcacacagctcagcttctgcgcccacctgcggctttcttctgaacccagacgctgcgcacccgccgccgccggctgccggcct

SEQ ID NO: 601 - protein, 385 aa, Homo sapiens [sequence omitted]

SEQ ID NO: 602 - DNA, 1158 bp, Homo sapiens
  source 1..1158: mol_type = genomic DNA
atggagggaggactggcaggcgagcgggcgagggagtctccggtggactgcagcgttagcaaatgcagcaagctggtgggcggaggcgagtccaaccccatgaactacaacagctatatggacgagaagaatggcccccctcctcccaacatgaccaccaacgagaggagagtcatcgtccccgcagacgccacactggtgacacaggagcatgtgaggcaatggctggagtgggccataaaggagtacagcttgatggagatcgacacatcctttttccagaacatggatggcaaggaactgtgtaaaatgaacaaggaggacttcctccgcgccaccaccctctacaacacggaagtgctgttgtcacacctcagttacctcagggaaagttcactgctggcctataatacaacctcccacaccgaccaatcctcacgattgagtgtcaaagaagacccttcttatgactcagtcagaagaggagcttggggcaataacatgaattctggcctcaacaaaagtcctccccttggaggggcacaaacgatcagtaagaatacagagcaacggccccagccagatccgtatcagatcctgggcccgaccagcagtcgcctagccaaccctggaagcgggcagatccagctgtggcaattcctcctggagctgctctccgacagcgccaacgccagctgtatcacctgggaggggaccaacggggagttcaaaatgacggaccccgatgaggtggccaggcgctgggggcagcggaaaagcaagcccaacatgaattacgacaagctgagccgggccctccgttattactatgataaaaacattatgaccaaagtgcacggcaaaagatatgcttacaaatttgacttccacggcattgcccaggctctgcagccacatccgaccgagtcgtccatgtacaagtacccttctgacatctcctacatgccttcctaccatgcccaccagcagaaggtgaactttgtccctccccatccatcctccatgcctgtcacttcctccagcttctttggagccgcatcacaatactggacctccacggggggaatctaccccaaccccaacgtcccccgccatcctaacacccacgtgccttcacacttaggcagctactactag

SEQ ID NO: 603 - DNA, 32705 bp, Homo sapiens
  source 1..32705: mol_type = genomic DNA
cagcccaaattatcagacctaagtaagactctcctgccactaaaaatgaggacctgacagtcattgtagcagtctcttcccaaaaacctattttctaaggggcctccacagacctccctaaccttgcgttagtcttcctccgtccccgggccaccagcagggaagagcagcgcagctggatgctggcagagaaagggtggtgaggaagtcaagcaggtctgtgcactgaggggcgagtgttggcagctctgtaagcttctgctcctcagcctgcaagaaaggggagtcctacctctgtcctggtcgcgttctctcctcaacacgcaccaagaactagaacatcctggtttccagaacaagctgcgggcatccccagttcgaaactgcccaggccctgggggaggcggcagtctgatttcgggcaggggagagtaaaaggactgtagggaggagacccaatggtgtgaggtggctctcagttctcaccgtcccctggcctgaagcccggggacgggactgaggcgtagggagagtgctcaacacccaaccactcggaccctccctcgccggactaggcggatctgagcttcccaaacccctacagtctctccatctgcatccccacttcatcaccatcccaccgtctctccctcgctccactcgcgggtaaccgaggcttctccctcccaggctggttcttgggcgttcccgacccttagctacccacgatgtttcagacagtccccgacacgtcgtcttacatcaaggtaagacatggcagcgtctttaaacaggtgatgacccccagcttctaccccacccgggcctatggtcccttttccctttccccgggaaaaaggggtaggggtggaagtgggccctactctcggctcgtggatctcaagctagggcgctcctggccagatgagagtggcacagaccctcgggaatcctaggttgagaagcaacgctcctggcggctagtgtttgggaaacttggagcaggagagcctggcgaagcctgtgcaggaagaccgagcagctcgccgcgtcaggtcccaacgggtggggtgctctgagcggctggcgcacagcgtgttccctgcattaagcgcgtgcgcgcgcttgtgtgtgagcgcgtctgtgcatgtgtgcatgcgtgcgcctgtttgcatgtgggcgtgtgtatgtggggttgtgtgcgggtatgcgggcgccacgcgcttctcctacaggtgagacacgcgctcagtcctcgagcccaccttctttggccccgcccgcccttcggaagcgcagattgctatatttgacagcacatcgaagggttttggtttttttttttcttttccacaacagtttccaagaatgtaaacaaactgaagctgggacacctgggttacaagttaaatgaaaatccgctggctgggtggggcggggagtgcgcaccaggaggccctgctcatgggaggggcggtgactgggtcccctcacgccatgcagccgcgacctgacgccctccgagtagggacccaaagcttaggaccatctgagtcagtccgagagcggaggaggaaggactctccgcagtgctgcaaacacccgcatacttttcccagatctctgccccgccctccccatcctgaagccccgcctccaagtgctccccagaccggtcagtgaggcccagctgagctccctcgagtgtcgggcaaatgccagggcagtccctggccctgtgtgatgggatgcagactctcgggtcctgtccaaggattgccaattatgcgtccaaccctcctcagatctctctaaaggaaaacttgtcacacggacgcatcttcccgtgtgaagcagtcactcgtcatttcaggaagggaaggcctaatcctagaggcttggcccaaaaaggggtgtttcattgacaatgcctgagtgagtgaatgaatgaatgaaatacagtgtaattcatgtagcaataaccagtgaatggatggatagcaaaatgactcccaggaggttacagagcatactttaaggttagactaaggcgcgcacggattcgctgtccccagttttcctgagaagtttaggaagagtactcgggtactcccaccactcggagtacccgagcccggcaagaggagctctcacttctagctctgcactgaggattgtaaatggccccggggaggggagctgcagtctctctcccactcataggaaccctcgagtccatacacaccccgggacccaggacctcagggatgaggagccctagaggggcacgtgggagccccggaacccgactcaggccacgggtcagggacaaagcggaggcgaggagacggcagtctgggagctgtgggccgccagagaagctgctcgctgcaggagctcttttcaaggtggaaaaatggatttttcagcagccacaaagtttgtattgttgcacaaaggggtgcattgatggcggcgaaaggtctgcgtggcagggacaatcttgagtctgttccaccggctccctccatcgaacatttgccagaggggcacaaacagttgcaggctgccaagcccctgccgttgtccggcaggcacccggctcaggagttgttgacaaacaccgcaggcccaggcgcccaggccccatgagggaggagcccagcctggcccctaggggccaagggtgccggctccaccggggtcacgatctgaacagtggtctgggctctgaggggtcccacagagaggtaaaggaggtaattgcccacataagagcgctttaggtaggaaaggggcagggaagaacaagggaaagggagagagggaagagggtgacacttggagacactgacatgcagtagttgatggataaccgcaacgacattcatagctacctctcagatcttaccttcgccagccgctgctctaagcgttgtgtctgtattagctcatttaatattaacaacaatcttaggaggtagtccattctgcaggcgagaaactgaggcattgtgaggttaatgtgatgtgaggggcagagccaagatacatagagtaatgacaaagttgtgctggctgccaggcaagttctaaaggcttatttcgtctttacaacagccctttgagataagtcctattataaccccattgtacagatgaggacagtgaggcacagggaggttaagtaacttgttcaagccctcagagctagtaagtgtagagctagaattcaaacctaggtgcgctagtcctcaaactggaacttccgctcctgatattttgtttaaggatggaggcgtggagggaccaggagacccagtggagtaaccctgacccgcacctgcacgatgcccgcggagtgcaaagcactttctcctagcgcgcagagcatatatctgaaagcttctcgcccgtcctccgcccaacacccccgcaggactggcagggtcctcctttttttctccttgtgtaccccccaggttccttgctctaactccttcacttatcagcctgaggattgggcccaggctgcattctgagggagatgccgtcttccgcctgtcccccggacgaaaggaggttgctagccccagaatgttcacagtgacccacccctaaggtggtcttgccggcgggtctcgaagctgagtttcaagaccacggatctgttcttagaatgaatgctgtttggggcggctgggaggagggggtgtgatggagattggagaagctgaacccaccttggccccatcccaacggccccatcttggatccgccactgggcgagggtctggacacctggctggtctccacctcttgtcagcctgctctctctggtcaggattggactccctcggggtttcctcagcgacgccgcgtggtctgggggctcggagaccctcctcctccccaacccgcccgcccccggccctcccgccgccgcggcctcccacgtagcgttctgaacccgctcagcgctaaggcaagaaccagcgtggggagcgggccaggcgagcagaggctctaaatcttccttcactctgtgagtagatgaagtctgagaaacaaattcaaagcaggcgcgcctgcagagccttcctgcagaaatattccccggcattcaagcgcatccaggggcggcttgagctgccttgtttggctaaggtcagacgagactcgagttctccaataaaaataaatctcaaattaattatggcctcgagcgagaggccagacacttgaagctgcatttgtgcagtctggagttttggcgcttgcccgcccacccctccggttttctcccgccctctcctcctccccctttgccagctcggatacccgctgcggcctcgctggaccagaggggcatgggaggggaggacgaaggacggagggagaggagcggcccgagacattctgccaggcctggcatcctgcggagtttcaagtgacggagccacccctgggtctgttaccccagggaccaggctcagatcgtcaggtccgcccaccccaaacccagtctggggccgaagaagcccgggaagcccgtgtctggaaagtcttgaccgggtcaaaagggctgacattgagcgagccaagacacgtttcgacccgccgctcccctcccgggggaagcaggacttccgcatctttgaaaatactgtcaagtgcgaatggtgcgaggcaagtcgtctcaccagcgttccaaatgaaaatgctccaaatccaaatatttcctgagtattcacgcccatgtgcacggtttctgtaagtgaccccagacttggaaacatgtggtgggctgttttgttgttgggacatttttttctccagttggtagcttttgttttaaatactgggaagagcttccttggctgtgagctgcctctgacttgaaaaccagccccgagctgctggaaagtgagctgtcgccgatggcactcataccagctcctgttcagcagctctgcccagtctgggaaagggcgaggccattggagccatggtaagccaggaaagagggtgtgcacaagtgtgtgggcaggggcagccttccccaagctgggcccagagactaaggaaagaggaaggagagaagagaggagggagaggagagggaaggggaggtctgccccactaacacaagacagttttcatttgtaggccctcaccgcaggctctctatcaatttgtctcaatgcaaacattcaaaatatcccctttggctgctcgtgaaaacaatgtgagctgccaggatcaaaccatctttccagatgtctggtggtaaccacattaaacagggtagacttgtttactattgtgcttggttagggcgcttcccccatcccctttcaggatttaaaaaagcagcagtagcagtggagttgaccatcaaaccctgagttacataaaagtggggcaaactgacctacgggcatgccaacactggatggaggaaatccgagattcccgcaggcatctagtcagagttaggtggggtcttctttctgggtggagacctctgtgaatggacaggagcttctcccagggggctgaaaatcgccaacaacagtggcaccagtgccagtctgtgagtcccaaagggccggggtgcctgtgtctatgcatctagtggtgcctgtgccaggctctccactaccccccgcccatctccaaaaccatgaaattgccgtagctttggagaaacagaaagtgcgatggagttccacagttaaaaactaaagggcaagtcttcaatttaatctagttccatattgaataattccagtgggggaggcagctggtgctgaaaggaattgggggacagtataggaatgttcgggtgactactgattaatgtagtgaagatgatctgtcacttgccagaccaacaggagttggaaagagaaacctagccatggtgtctgccacagagggaccctctaaagtgctaggaggagggtggggggcagtcgccacctgtgggatgccatgaacagcctctgcaactggccagcaccaggaaggggggcctcctggtggtggagttggagtcctttctggctgaatgaggagcaatgtggctggggtgtgcgggtttctggtgaggtccgggtgggaagccgtctctccgcattctcctgaaagctctgttgtagtttgaaggtcggtagagcctgggctgaaaaggaaacaatttggggtttgaaaggatgtaattcattcttcctttcccgttaacctctttcctctctggaaagcacgtggaaacgctgaagggaggagtgagagggcaggcagcctgccgcggggaggaaagggttaagcctgatttcttttaattgaactccagaactggtggccccaggcaaagggggggactgaccccgctagcggtaaccagatgtggcggtcccaggggagccccggagcagacccctggattgagaagcagacaggagcggggggagtcagcccggcccccatcccaccatccaccccacccccacccccaacacgcacaccaagtctcaattgctggcaggctgcacccgccactccaggtctggtcacgttcagacccgtgtctgtattcgaacccaaaattggagccgaattgatgagactaatttctagagagggagggggagggagggagacgagtgagctctcgggctcaattgctcctgaagaaataaagaattaataagtcaccttttttcgcctctgtggacacccttttgaaattttttcttccaattgacttggatctcctctggattttttttccctctttcccccgtcggactcttaaataaaagtgagcaagtccaaagcgtggtccggagagcgtggacaaggtaacctgttttggatgtccgggagaagggagtccggccgaaagggcccagcccctcgaggctgctccaactggggcgcgcggcggcccaggagggaggcggggaggtctccgggttgggccggggaacgccggcctccaggctgggtagggaggacggtccagagcgcgggcctccgggtctcaccccgggaaaagtctgggtctgctctgcgctgttgcgtgctgcgctcctgggacctgctgactgtcctagagggaacgtcccgcggtagtgtcagttccctggggaccaggaagggcgactcttgcctgggagtcagtgcttgggccgtcgggtccgggtaagcgctgggggtttggctcgagaagatgcggataggtggcctagggcgccgcggatctccgccctctgcgggcaccgggagcccagggtcgaggcgcgccgccccgaggggccccttctcctaacaatgcgcccggaatggagtccgcgccctgacagcgcgggtcagcccgaaaccgcccagaatccgcttcgatgagtgggtgagccgctctgggagtctgccgcgtctcggcagcggagggcctgagtggaaaaattcttattggatgcactttttaatggttggtttgcctcggttttcgtccgagtcttccccggcagtaggcgctgggttacccgcagccctagccaactctccctccataccccccctaccccacccccaaaaagtttgtctccggctggaaaaagcattaatgaacgtatctgtgggaagaaacggaaagtgaatgagtcaggagggccaccttcggccaaccgcctcaggaaaagcaaagaagccaaaggtctttggctttggattttgggggaaggtgatggggggaggttcagacttcgggaatcagggcgcggacgctgggcgtggaccccgtcattgttcccggctagctcttatctcccaggagcaagtatcctgtgtgcgcagcgcatgaatgtgtctgggcatctccgcgtatatttatatagtgtgtgatgcgaaaagcaggaccagcaggggaggaagagggggtgtggggggggagggaagacgagggagagcagaggggagagaagagagaggagagctcgaggcgagagagagagagagagagagagagagagagagagagagagagagagagagataggacttcctccccgattcgcaaagtgaagtcacttcccaaaattagctgaaaaaaaagtttcatccggttaactgtctctttcgctccgctacaacaacaaacgtgcacaggggagtgagggcagggcgctcgcagggggcacgcagggagggcccagggcgccagggaggccgcgccgggctaatccgaaggggctgcgaggtcaggctgtaaccgggtcaatgtgtggaatattggggggctcggctgcagacttggccaaatggacgggactattaaggtaagcggcggggcaacggacgcgggcggcggggaccggccggggaggcgaagcggcgggcgggtaggtgcggggcccgcgtcccggaagacgtggcctctctcccttccctccgcgccccggcttcgcgccggctcctccggcgctcgggtggcgagtcctactcgcgggccagccggccaggcgcccgcattgagggcgaccctcccccgaaatcccagcccccaaagtggagccccggcccccctcccacctcgctgcccgccggggctgcaggaggggacggcgggaaaccgggggaccccagggtacggaacggagtcaagggcgagagacctcggggtccaccactcccaccgacacccggggctcccgtggccccagcgctaggcactgggcttcctctccgcagaggcggaacacggcgggggcgggggctgcagtcgcccgggctcgggtccctgcctggtgggccctggggtgggtaagtggcctcgttgcacgagggtaggggtgcaagtgagtgtgtcgggggatctatctgagcgggctcctccagatggaagcccctgtttacatgtcagcgctttcccttcctctcggcactcagtcgcccggctctaggcgctggagagccgccggctccgcgggactcctgggccggcctcgccgcctctccggcggggaaccttccccagcccccgtccgcacagatccctagcgccccgagcccccgcccttcgcgcctaggcgtgcgccggctccaggaccagggctcctggagctgtcgcctccgaaagggtcctgcgtccttcggagccgcctccgttgcaggggccggctgtgagcccgcgccccgcgcccgcccggccattcccaccccagccgccgccgccaagcctgggtctaggttgcaaagtgcaacccaggcggaaaggtgagggtttgggttcgcgtctcacttcagaaaagttgactgctgtctctgaaagggttcgccaagtagggccaggagcagagaggagggacaccccctaacgtgacgggccttagaggacctaggggaatgaatgggaccaggggttagcttcgaggctgccgcgcaacaccaagcgggagtctgtctggaaaaactattaggctggcgaggtggggactggcagagcccgccattccccagaacccgaaagaatcgactccctgctcagggctcagcaagagaaggctaagatgttgggctcagagaattcaagagatttttatcttctgggtggggtcgtggtttttattttctaagttttttttatgaaagtttgaaatatgctgacttaggtaaaagacaccaaccgaaggaacttgcaaatctggagatgagataactgactgtgatgggttaaagggagctataagagcctataagagcctgggttcctcaaacccaaagtgagtaggtgagaagtaggtgagaggggattcctgcaaagacccgagagtgggggtcattgggccattttatgcctgtttctctgcttcctgttgatgtgttcatgcaagtgtctctgtatttctgggtttagtaatgagatgctcccctctagaaaactccctcgccccaatcaggacagttaccacttactctgaaggcctcttctgatccagaagggtggtaagatggcctcagggtcttgatgtggacaccctaaggaaaagtgaagaaatatctccacactgcttaaactctacgcacaggccctgagcaaaaggaggaagctgtggtctgtgtacccaggatgtgctaacctctttagatacacacagggattggcatggcaggcctcgagaacaggcttagagcaggaacctgacacttcaggccaaggatgggagtgaaagtccttcctttttttgtgggtggtaggagccatgagctcctccaaaccctccctgtgagcaacctgtcattcacctaagttacctggctaggctgagtccccacagagctaccttcagtctccaagcattctgcaagattgagcctttagtgtgtgtgttggtgtttaagttgtgtgaaagccacagttttctgttcgcatgtgacctctggatcttggggtttccagatcctgttcccacaatagttcaaatactgtgcttggagaggacagtggaccaggagagaggccagcattcttctgctctcttggtgagaatgaaccgtccattaagcctgtttgagattcatagtcatcacaaaaatgaaacagtggaactaggttacctctacagtagtatctaaccaatcttctcagtgcctaaaatgtgctcatatgtgtttacaagaacacttgcctgtatgtgcactaaatccagccctacactgatcgaggttgacgacactctagagagaatctaatttgtgtacacaaatccagggtgtccatttccagtttgaactgcctggaaaaatcaggtttgagtgattctaggatgtgattttatgcacctgcatagttcttcctcaaatataagtcatgtctatatttcaaaatacctgtgggtcttggcacttaggtggtatttggtgcaggaagccagggaagtctggatttcttcacagaagccctttattttgtgcataatttgcacaactctatgtgattacaaaatcccaatcttgttgccctccttataagtccctccatattatattctcttctcttttccaagaacggctcctggaaaggctctgaccgtcacattgggagaagcaatatttgctggagccacgctactcttttgtcacagacaggttaacttgcagtattaaacaacacccgacccacgcccctgcttcccacactgatattatcagtgttaaaaagcacatgatactgtttgctgctttaagaaatgacctggtttcaaaaactgcatcttaattttaggctggcttcagttgaatccagttaattttatctatgaatgcctgactcagtgcacgtggtgtcattacagatggggagacagagaagacagacatggtgaatgaaggtgggaaatagagaatgaacagtggatttggagtcagaaagcccgggttcattctcagctctgctacctagtagctgtgtgccttatagcaaggcacttcttgtatctgtttccttatctagaaaatggggccaaagcacctccttgccacaagccataggaagaatttttaaagtctgctaccttagctggatacacattaaattaacttcatgtgccttatagcaaggcacctcttgaatctgtttccttatctagaaaatggggccaaagcacctccttgccacaagtcacaggaataatgttttaaagcctgccaccttagctggatacacattaattgaactttgcttttgggaatgggcataccaggacagattggtcagaaaattagaacacaggtccaaatttaccatcatgcatatttcattaattcaacaaatgtttatgatgcatctattatgttgcaaggctctgcactgtgtattgaggataaaacaggggtcaaaaccctccaggaatgtagacgctagtggagggagctgacacatacagagaacaatctcagttgagtggtgatatatcttctgaagaacaataacgcaggttagggaatggaaagtaatgacgctatatagccaggatggtgaggagaagcgtgtctaacaaagtcacagtcgggcagaggcactctctcgtcattaactccagaagagtacagcaccaaccacacagccagtcaacaatggacaagcacagcccgaaagaagggccagggttatggctggctctgcaaggctctggagggcaggttgtcactggcagggcagggaaacatctggacaaggtttggaagaagcagcagagtgaggaatacttgggaacagaggcttgacttctgtcctcaagaaggtgttgctgcctccctctaccacacacaccttgtaatctccatgtcacctggattcacaagaactccagacaagatggcctctgtctattgatctgtccccgtgaccacacagaattgctcccctcaggtggttaccaagtggaatcctgttttgtgtgtgaataatttccaccaaaaggcttccttccagttccactgccatccaaatttaagtttataggttggcaactttaaagctttagagagtgtttagcttgaatttctcactttatgggtggggaaactgaggtctaggttgttaaatgaattgtccaagatcatacagctaactaccaacagagtcatagtgaaagttcagggctctgcacccttaggccagtgttctttccactataccatgaaaatatcatttgcttttgttacatttttatgaattatagaatcgtggaggcagtgtgtgtatgtgtttgcgtgtgtgtgtgtgtgtgtgtgtgagagagagagagagagagagaagtctttaaaagaaaaatcataaagaatttggcactttacactaaagacacctctggtatttaatgaaaaataaataaaattgtatcactaccatcttgaattatttttatccttaaagaaaagaagaaattccaaatttttggatagaatttttatacaactgttttccaaaataagtccttcttttccagcagacaaagtaaacagtctccattacaaggagacaaccaaaaatatagtagtttactgaaatacccaggcccttctacagatcatgggcaggtagacagacggaattcttatttcagctcctttaataatggaatattggactatttaaataaaatctattagaaggcatcttatggatccatcagactgtgtcataagtaggtcttgaataacaattgcattaaaaaagatttgggattttcatgtctctttctgtttggggttaaacagttaacttggcatttgtttaaaaaacagttgatttaaaccaagcctctttctaggtatatagcattagtctaatgccagtactaagttacccccagccaaaaaaatagaaagaaagaaaagagttgggaaaatttttatattgatagtttttttgttctgtacttaaaacattccttttaagtctatattttgcttgttgttttgtaacgaattaagtaggctaagggacattgtctgttacgtacacacaaacacacacctacacacacaatctcataaaaccttcaaccagccacaatagcttttttcgtaatctcagagttatacaggtgtcttttcctctgcagaagactacaccctgtttcaatttctgttgctttaatgatttcatatctatagcgttcttcccattatgtattaattgatccatgggatgatatcattaagtgatgtcactctttgtgtattacagttctgccactgacctgatagacccaccatcagttgcctgtgcactgagatgtttccccagaggctatggatagggttatatgtccccacactatctgcagggccaatatagtgcaaatctgacaaaatttaggtaatctatggaataaacctttcctgtgcaaagctagctggccttatgggaattggtggtacctcagtctcaggggcatcataaactgaccaaccatatgaaggtgattgcatgtctgttaggcagggactaaactatgttctgtgaagatagaaccccaatggcaaaagggctctgccaggagatctagcgagaagataagccacatatgtgtgccctgcagagcacagcaagtgttaccatagccctgagaaaagaaaggatgatttgaactggagagacagacaaagacctcatgataatagttgtttatgtagtccctttcataaatctcttcacagatcatacagtccctccacagatcactggcccacacactcttgcatcccattctcacagtagccctatgggagataataccatgatgtctctacttcatatggaagaagttaaagttcagaggagtgaggtaacttgcccaagagtataactaacaggggacagatctgggtttcaagcccagtgtttctcattcctgattcctgcttttactacacacactggccacactgcctcttggcacaggtggatctaagcctggccttgaaagataggtaggtcttgcataggaaactatggtaaagggctttctaggagagtggagggtactttggggaggaaagtgtacaggtgatggagaggatgggagtggaaagactgaattgaactagactacagaggaccttacatactataacaaagaatttgggggtgagtatggtggctcatgcctgtaatcccagttctttgggagacggaaatgggtggatcacttgagcccaggaattcaagaccagactgggcaacatggagaaacctagtctctacaaaaactacaaaaattagccgggcatggtggcactcacctgtagtcccagctgctcagggagctgaggtgggaggatcacctgagccaagggaggtcaaggctacaatcagccatgagcgccactgtattccaccctagatgacaaagtgaatacctgcctcaaaataataataacttgggtcttgtaacatgtatagaaaggaggaatgaaaacttgtgactagagggatgatctacatagctgtacaagtctcttagaaacaaatccttcgtactctcttctccttaggaaatgaagatggaagtggctccatcacttatcagaggccacacaagaaatgagcagcagtcaggattagacaaccagagatagattcaggcaaccagcagtgctgtcttctgtcttcaaagacacctgttgattaaatatggcattaggggagggaggagaaactctatttcaccagatgacataaaactgtgattatccttctcatcccttccttcccaggggatttcaccatgagcaatcttttcaattgggccttctatcctgggctacaattttagttccttttgagaatgagtcagcagatagtgcttgagaggagaaaaaagaaaaaaaaaagtctctctaaaactcaaatcaaatttctgtgggccttcagacaagtctgacattcttccatgagttggctgggccgctggtctcagttaggaatactgacacttcaccccagcaaaccaaaaacgcagagactcatcaccgtcattccaagtaggatcagagatggagtgttcagacgcattttcagataattcagatcaactttacagtaccttcaaaattgctcatccctacaaaaatgaagcaaacactaatgtatttaagagatttgccatctttgggaaacaatgtgtctgccatttagtttaagatcaaaatctcagagtatgagaatttttcaaatcacctcaaagggaaggcagacttgaacactgaaatgctttcccaagagcaagccccatttacccagccagtgctatgtgtccaaggcaatgaaagatcttatgtcacatctcagtgcacacatgcaagaggctggaattacaggtgccatgggagctttaacctcgaatttctagacattgtgtgggtttcacatgtctactggaatctaacactccagtagcagaattgttaggtctgaatatatgggtattcattgatgttatgggaaaggaatcggagagtgagcaattctgcagtaccattcatgtagcaaaagtgtgaaaacaaacaggttaatattagaaaattactctgctcatgagttgttttaagttactgctgttacagtctatggaaaagcgtatgtttcaattgaaattctcatgtctacagagtcattttgtctttagacatttatgactgaattcatactcattcatgtattcaatactcattcatgtattcattcacccaaatgttgaataatattaccaggcaccaatctcaatagagcattcatgtaaatgaacaagaataaggtttctatgctatttcttccaggctttgagagagtagacatttctcttctttctgatttttagctctgagtattggaaattccaaaagaagcaatactcattggagaaatctttatttgtggcttataatcataaggatggttagacacattttcttaaaggtaacaaccagtttatattctccattgccccttcacccttggtgatataatttactgtaaggatatttttggaaggctaggtcttcagccaaggatatttcttcttctgattctccctttctcagctttagttcctctatttatatattaacatggggccaggcacggtggctcacacctgtaatcccagcattttgggaggccaaggcgggtggatcacctgaggtcaggagttcaagaccagcctggccaatatggtgaaaccctgtctttactaaaagtacaaaaattagctggtcatgctggcgcatgcttgtagtcccagctacttgggaggctgaggcagaagaattgcttgaacataggaggtggaggttgcagtgagccaagatcgtgcctctgcactccagcctgggcaacagggcgagattctgtctcaaagaaaaaaaaaaaaaacatggagaaaaataccataggtaaggtgaaaactaaatgagaaacggagaaagaatatttatcatacataaagcataaatgtcctatcatacaaagactacttacaaatcaataagaaaagacacaccacttaacagaaaataggcaaaaatgctatgaatagacaacactagaaagaaaatacaaatgggcaataaataaatgaaaagaatttcaagcacatgcataaagacattcaaataaaaataataaaattccaatgtttatgacctaggaggacagcagagactaaaacagcttaatgtctcatgttggaaagagtaaaggaaatgtcactgtcttatcctcttggtaggagtatgacttggtataatctttccacagagcaacatctatttgagaagttaactatttacacaaatttgataatgccaattctacagctatgttcactcagatatatgtacaatgtgtttattgtagcattgtttgttacagcaaaagttggaaataatctaaatgtccaccagtaggggactagataaacaaaggaggaaagattcatgtaagaaaatgccatgcaactacaaaatgggataaaatcaattgtcgtatacactgatttagaaaattctccaatgtatattattacatggaaaaaagcaaaaagttccaaaatattgggccgggcacggtggctcactcctgtaatcctagcactttgggaggccgaggctagcagataatgaggtcaagagattgagaccatcctggccaacatggtgaaactctacctctactaaaaatacaaaaattagctgggtgtggtggtgcatgcctgtagtcccagctactggggaggctgaggcaggagaatcgcttgaacccaggaggcagaagttgtggtgagccgaggttgcaacactacactccagcctgggtgacagagcgagactccgtctcaaaaaaaaaaaaaaaaaaaaacaaacgttaagagagacacagaaacagacttgtaaaaaggtgaatgggcaccaagattttatcctgaatgtgctggtcccggtgactttaagattcgaaattgaggtaaatgcagggagaaattggctggcctaggatccggagacctgagttccagccccagctctatcccaaactagctatgggatgttaggcaagtcacttcacttcctcatcattcatgttaaaggtcttctcatatataaaatgaaggtatgatttcaaaatttgctttcagctctcatgttcatttgactctgatcctagacaggctttaaaacatttcttatttgggggtgtggatgatagaacctcacgtagatgttctatctgatcctgtgtggctcttctcccataatctcagggctacattttgtactgtggagtgaccctcaaggccaggtgaaggcaggggctctcagcaggtgcttggtgagtttctccgagctggttgtttttattgccaagtgacactagaactgtgctaatccctttccgttaatgcaaactaagaatagggcctgacgccactctggggtcttagattcttttccgaaatttggtctcatttaaaacccaaaacactctttggctccaagcgtctttcccgtggcctttaaaaaaatcctgtttaattgaaaggaaattgaatttgtctggttttgattcatttacacttaactcttctaaaaacaataatttgatgtccaaggagaattttgagtctcttaatgggttttctggaaggctttgtttcttcttgttaaaacaggaagtggtgttctatgggcaaacacagtcaaccccagaaggccccaattcagtttgaaactgtatcacccaccattttgcatgggtcctcatgaccccaagctaaggcctttctttccctagtactcacctaagagaaagagatgctcatctttcatcagagggggaataaaaatgaggaagaacaatcatagttataaagagaataagttatctatccagctcaaggtgacaatatctattcaaacctttaagacatgcacttgatccctgtaacaaccctgtgatgtatgtaatatttccattttgaagagattgggtaagttactcatggtcatacaggtagaaaatagaaaagcaattattggaacctaatcctgcttacttccaaattccataaagcttagccactgtgatacatcaccagattgatacatacatctccatatagtttaggctacgagcccatctatggggaccatgtaggttttgttactatttgttttatctctttgtctaagtgaccactatccacagtctgcaccggtcagattcatgaaactgctcaattcttcacaactctttattcaagaaggcctatttcccaggtaagaaagcctgcctggctttgttagcaggtgcactggtgtgaaactgacaggttctctttttacataatgatccaatgagttgatttttaaatgttttatagctcaatagagaacggcatattctttgacctgccaaggcttcctcctctacccttgtaccttcgttctttcttcctttcctcctcgaaatcttgctctcttcttcattctattccactcatatacacacaaaactatacacaattttttttaaaaaacataacagattcaggaggttatataaaacacaaagaagggaatgttttgcgaggttaaaaggaaatcattgagtagggctgacttcaggctccagtttctcttgaatagcctttcttgttatttcaaggctgattgacttataactgcatccaaagctgcctcacaccagttccttttatcagaccaagtgagacttcctgtggactggcccagcttcctgatatatttcctttttcctttggcagaacaaagaaaaccatagctccaaggatccttgggagcaaacacaatttagccctgaagaacctattattttaaatttttcattctcaatgcgtagggccaagcgcctgcctttgctttttttttccccacagcattctgtgtaatgtcccgatgaaccctatgtgcaattaccaggggtcgatgagctacttgaattcatcctagttgtagtttgattttattcaaagtaggaaaattaagccattttcagtgcacaagcacccccacctcatacacgcatacaccttcaagagggacgtggaacacctctctacatagggtttaaccttttgttacctgagctcaacacaacaggtgtgcaaggaaaccctcttgtctagagatttcaacctatctgtttttgcagttctgactctagaaacatgcgtataggagaagaagcttcaaggtgtatccaaaggatcatcaaagtcagttgaagaagaaattccagaaattgagttgagatcgctgcttttctcttttgcctggagtgtctcccacatcactccatacaacgtggcctcactattcactctacacattactactgaaagacctttaggcatgacccagggtaacaagggagcactgttaagaaagttgcttgtttctctgtcatatctcccaaagtacctatcacacattgccaacttaggatagccccctccccagtagtctcaaaaagaaagaggccattgacggagagacaactgaggcttcaagatgtagtgtgtcaaaagatgggaaccaggcaagagcccctggaagcagaactcaagtattcatgcccccaaacaccacgctctacaatgagggtgttttctggagcaaagatatcaaggctcatttaacccacagggactcctgcttctttgttcattggtcctattttctgaccattgtcataatatttctgggtgattgaagagggcactttccataggaaccacatgggtaagtgagtaatcatgtagccacccaaattttactaaagtagatttttctctttaaaaggattgctgatttggaagagggtaaacaacaaaacaaatgtagctcttctggcaagaggcatttcttagggctaattcaacatggttaattcataatgatttttcctaacccagttctcattgttatcatgtctagttgaaaatggatttaaagaatattcacaaagaagaaaataactcagaaactatgtggcatgaggagactgtgagggggttatgggcacggttggtgtgctctgctttgtataacctgcttgggcgatagcaaaggcaaggggttaaaatgactgccccacactatgagcttaggatctttcttttcccagcacgatactctgtcaatagccctgtacccaagttcatgaacagtcaggaatcctgaagaaaagattcatacattatcttaagcaacttcccccgccctgataacactgcctgtagagaaccatgctaacctgcccttcgacttctccataataagaacacattggtcgaagggcacaagtcctctttctcaaatacggtctttggtgcaacataggacttccctagaggtgagggacttgaagggcacctgtactttttgcacttttctagaaaggagagggagaaagagcaggtgacttttctagaaacgtcatttcaggaaaccagcatgtggagacttcccagggtgccttggggaaggcatccagccctgtggctgtgctgctctgggcttctaagccattccttttggagactgtgggtctctataaacatactgagtctgaagtgtggtaaaggaattaccatggctccccctccctgccttcttggagtttgccccctgagttttgtagacaagccatgacagggcagtaggactgggtttagagctcatcagaattatttatttcttcctatcagtttggacagggtatgacccagactcttctctgcccagagcacccttttaaaaaatttaaaaccctgtgtgtatttcatgggaaatttcacatgcctgtttctgattcacttccaattaaaggctcaaaacactggttttgtaagagctctttgatgattcagattcttgttggttcatctttttttctctcctaaatgtccatagaagcttaataaatgttgttcagacatttgcatgcttaactgttgaaaataattggaaacaggaaagaatgttttgttagtgtgcacagtacaagcacacttacaagggaaggagagacacagcctcagtgaagggaaactcctgggaaaacaggggtatccctgaaggtgggtgccttggtttccccattgccgtgcatgggggaggaagctttcagctcagagctaccaaaaagggagaggagcgttacatgagacacaagaatccttcttactgtggtcagttaccatcgacaagcagtcagttgagtggtcagtctcatccaagatggaacaggtggattggcattttccatatgctaacactacttttaactcccttctgattggaaggagttggttgtctgctattagagcaagcctcgttctccacctcctttaaaaactttgctggtgaagctgtctaggtgcacctgtgcctagctcccctgagagagttttatatatcggtccctctaaagtgctaatgtgggcaccggcttgggtagtctgagttctgtacctggttttgccttaggctggcttcgtgacattggacaagttactctccccttctcagtgggtccatttacccaaaaggattaaggcttcttgatgatcctcttcttccatggatttggtaaaaaactggagtagtgagttgctttgagtttcttcaagaaaagcgtgaattaattactacactttgactaactactgggtggctcattggatggctttcttgttgccaatgtaacaagattgctgtaaatcatgcggcatttcagattccgagccttatttggactttttactaaagaaagagcacccgccccgtctttttatttgtcaggcaaagttcagtcagccaatattcagttagccaaagttaccaaatgtgacttcatgcccacacaatgtaaatataatgtgtcaatgctgtgtgctgtaaggtgcttcttgcctaaaaaaggtgagacaaaaccttaggaaggctggcagtaaacctctggagtattttgccagattactgtgacagtggcagaatgattttgtgaaagccacatgcagtctgaagtttggaaatctaggttcagacccacttattaattgtgtggtcttcggtcagataataacttctccaatctcctttcctacctgtaaaataatagtagtactggtagtaataatgcataacgttaatttttctaccaaccttactaataataagaatcaaaagtagtatggaagtaaaagcactttgtaattgtaaagtgctgtgcaactgctagttgttattatcttagttattattctcattcaagtcgatgcatgaatataacagataataaatgtaacttaaatctgttgggttgcttttttctggccttagtgatttcaaagacttgcttgcatgtggttaaattcaccagttagtgacttattcatatctctttgcccatgtagacaccatcccctacaaatgcacaagtacagatcaaacatcccatattcctcctttccctcccacgtatccggccattgttctacttgtgaaactcccatcccaatcaatggggggtttacgtaaaaaccgatggcaggatatgagtgtggcttcaggaattccaggcttgtgctgctgataaagagagttgtgtcaaacagaaaacaccagagaaacaaattctcttgtccaacctatgctacagcactcccttgtgaatagttttaaaacatccgtctggctgaccaaatacctatggctgcctccacccatacatctacgccacctcttctattatcttccccatgtccttgtggtaatacagtacagaaccaggctagaagtaggttaattcagagggagataccagtagaactgagctccctgattaagggatgtgaatttaattgggttgtgacagtctgtattaagtgtaaatgctactaataggtttaactgactttggtgtgagtgaagggacaacagaacaaaagaagtaatttgccttgaagatgatcctcttttagtgttgaagtcacaagtgatggaggcccttctttcacttaacgaggccaggaaagctgggttggtctttattctcatcatgcatcatcaatattttaggaaaggtcatattgctgtctttcacggtacactgcacaaccaagtatgattatgtgaccagaagtgaagggaaggagaacatttgcccatattctacccacactgaagtagctcaaaaatgaagagatgaagaaaggaaaatggagttgaccatttccatttaagtgctcattcagacatttagtattaaaatgatgaacttcttttgcaatctttttattgaacgcattgaactaggtattagggtgttatccttggccaacagaattgggatttcaaagttcatgaggccgaacattgaactgctcaaacactagtctgtagttcctagggaccacaatctagctaagatcagccctactgctttttctccatgacaacaaatcaccaccaagaccgagatgctgtattgaaagagcatgctgtgtttttccacactaacaccacagagtgaaggtaaagagattagagagcatctcaaatttatatttcaaattatgaagaacatctgacacaatgaaagcaaatgcagccttgcagaaaatttatttgtctatctttgtgatgttggattgtataaagggtttggacatactcattgtcctaccaccttaactacataaaaaaatataatctcttcagctactaagtttctgattttgcatttgatatgggagcaatagtattttattgggctacacaaggttccaaaatctctcttttgaagatattcatgtgtaggaaactctgtaacagatatagctcttgcacaatttttaggagaagagatttgggaaactttatcagtttttctcaacctttttaactctatcttaaagtccaaggaaagtgaaagattaagaaaactttccttatcagggctgtccaacagaactttctacaaacatggaaatgtcctgttctgcactgttcactatggtagccactgtactctctatttgagtggctattgagtatttgaaatatggctagagaaaggaaatgtaaaattgtgttcttttttcattaagtcaattaagtttaattagttgattaatctaattaattaaatatggttagaagctaccatagtgggcagtacaagactgcatcattcaagttaaaaacatcatcttgaaatctgaattcagtcagaggggcatatttacacggattattttgatctgagtcagcaatgtgttgtccacatggagactaacacttccatttattcttatgactaacattaaagcaaagcaaaatgaaaagtgaatgttcagcattatcatgttggcctggggctggagctaagttttctatcccgtctcctggcttcatcatcaattctctgctgacctttaagaatgtaatactttatttcccttttatcaaatgagggcatttggaatttatcaaaaggatagtcacgaatcatgatcgaatgtttattgggcttatcaaagaaaggtatgggctttgccctataccttttcattgaaaaataatcttggccaaaaggaatccctattatacataatggcgatttcagtttctccatttgcaaaatactggcattgtacttgcttatttttaaggtcatttttagctctaatgctttatgccaccatgaaaatatgatttcctattaggtagagctccatactattaacagatggtttgcttttctagttcccagatccctataaccgtttgtaatatttcttcttaagtataaatgtgaacaaagcactttaatttagcaaataaccagctaaagtggtagtctttgtctttttttaaaaaaattttattttaaaacttactagttagactggtagtccttgaaagccaatttctctccaatgagtattccctaggtttgtattcaacacagtttggtcgtttgtcctctccaaatctcatgttgaagtatgattcgcagtgttggaggtggggcctggtgggaggtgattagatcatggggggcagatccctggtgaaggaattagtgtcatctctgggcgagaagtgagttctggctcagttagctcgcctgagatctggttgttaaaagagtctgggacctcctccttctctctcttgctcctgctcttgctatgtgacacgctggctccccattcactttccaccacaattgtatgctttctgaggcctcatcagaagcagatgctggcaccatgctttctgtacagcctgcagaaccatgagcaccatgagccaaataaacctcttttctttataaattacctagcctcagatattccgttatagctacagaaaatggattaagctagtgctgttctatggtacactgtattagtctgttttcacattgctggtaaagatatacccgagatggggcaatttataaaagaaagaaagaggtttattggacttacagttccacatggctagggaggcttcacaatcatggcggaaggcaaggaggagaaagtcacaccttacacggatggcagcaggcaaaaagagagcttgtttaaaaaccatcagatgtcatgaaacccattcactatcatgagaacagcacaggaaagacccacccccagaattcaatcatctcccaccaggtccctcccgcaacatgtgggagttatgggagctttgggtggggacacagagccaaaacatatcatacactttccaaagatctatatccttgatatcctgagacatgaagcaatttctctctacccttcatacttctcacccatggataatagaaatatattgcctgctacacctcctgtggttttagaatcactgtgaggaataaataccccaggctttctcatggggagatctgacttcattactgaggtctcgctaatgagcagacctatagcagctttttctttggaagtcttcaggtacacatcattgcgaaggtcaatcctgtgtccatcactgaatggcataaatttgtgaggtgaactgtttaaaacaaagatgggcagactcctctcagaaaatgaggccatgttcctagaggtccaactctatgtaatggtcttaggggtgatgaagcactgtagtcctgcttctcactcatacctgccctccagaaaggataaaattataaatgtccaattagagtctttattagtctcttcctatgtagaatttatcaatagtttgacagttctgcagctcatgcattttcagaaaaatccttcttcagtttaaaacattccaccattgttttttgttgttgttttttcaaattgcattgggaagaaggtaaggagtatgtatagaatacaattctgtgaacaaagtgagtgagttacttgctccttgagggcagaaactctggccatttgtcctcaagtcctcagtgcctgacacatatccatgtattaattgagctgcttctatgtgccaggtgctggagtacagcagtaaagcagacaggtatagttcctccttggacagaggtaatagtcaaggcaaaaaaaaaaaacagttattgagcttgttgttataagtgcaaagggttctatgaaaggggaagtatggggtgcctcgggagggcacaacgtggggacctaacctagtctcagaggtcaaaggcttccttaaggaagtgacatttaggccgaaccctgaaagataagcctcggagtcagtatgaaagagaacaggccttccaataagtctttactggatgagtgaatgaatgaaatggccacccggggcattgctaaattaagtaccttgagcttagtcatcctaaccatagtccccccaggcattatctgtgtggccataagccattttcttagccactctcttcttcagtaaaggcaagtagagtgtaatgaagaatactgtgagaggacaattaccttagaaggcattatcagactaatgttttactgagtgcatagagtacatatctataggttaatatgcctttactatgcaatgcatccagaaatttcaaagtcaagaagattctaggaggctgaattccacctttagaaatctcagctatgaaagctctgggtttcaacttgatataactcttcactggccagaaaaaaaaaaaaaaaaaaaaacggcaactctttggcaaatagagctctggaagatgcgctggctggcgccgacataaactgctatcctgatctccatcaaagatgtgggccttctcatgctgcagtttcctcaactgcagaacagggagattcttccaatgataattttacctcgaagtgatgttgtaataaagatggtggtaaaagcattttgcaagaccaaaaaaagaaacacctactaaacaggcatgctgtctatatctggtgtttgttagaatttctgaggaaaccctctggtctaagattctagagagtctacagaggttgataactgggattggcttttaagatcttttctggaatggctgttccctttacctcattattactttaaacaactttggcaggagatatcagtaatgccaataacaataatgatgatgatgatgatggttactgagtagttactgatgagcccagcactgtgctaaacacttgaaggacctttttttttttttttttttgacagagtcttgctctgtcaccaggctggagtgcagtggtgtaatctcagctcacagcaacctccgcctcccaggttcaagcaattctcctgcctcagccttccgtgtagcttggactacaggcacgcaccaccacgcccagctaatttttgtatttttagtagagacggggtttcaccatgttggccggaatggtctcaatctcttgacctcgtcatccgccagcctcagcctcccaaagtgctgggatgacaggggtgagctaccgcacccggcccttgaaggcattttagcacttgacttccaccacagccccaaggaatccatctatcatgactcgcacgcacccagtgagaagaaccaagacatacgaaactcaagtgacttgccaaaagttgtgcagctagcaggttctgtctgataccaaagactttactcactgcatatgtgaaatattttgagattttcagaataagagctcagggttgctaagtgattaaacatatacaattaattattcctgccctggaagacaagagtgttaccattagcagaagtttatttttgcaattcctctggccttctggtgttcccacatgcctccaccccttttcctaacgtattgcttgcctgttgtttaaagaaaacaaaaatttattctcaaacttgtccaaatagaaatgaattgcattaaaaatagtgaaagccatggtgaaggactgaaaaagttgaggagtcaatgacatttgcagagcccctgctgtgcaacttccatgggactaccaggaccgaggctatattttattaataagatctcaatttgtaagggtcattttattatctccgtatcccccatcccacctcatttagttggatgatctagagagaaaacagcatttctaccttcttgcaatggaaacaataggctttgcttgtgccacttttattttcccactggggaatctgagagatgacctgattgaattccacccgtaaaggtcatgctttgaattcaaggcagaggaaaaaaaatgaagaaaacattttgcaatgataccccacgagtcctgagcatgctggggcctctcctggttgcattgtggtctgctgataaggataacattaatgacaagtggaacatttccaggacaaaggaaattccctgttgtattgtttaaaggaagccaccatccactaaggagagcaaggtttgtgatgtaggcacagatttccctgcaggagaggcagggagagctgccaagctgcctgtgagtatgcctgtccttaatttcatctggggaagcatttgcatggttagaagtcaataaggggtcatggcagtttatggcattggtagggttaggagccagactgttagaaatggaggcacattggctgggggagtaaaaagcctgattcatacaatgcagcccatttaggaatcatagcaaaagcaccaggagatttagagaagttgatctggttttgagtttaaattctggacctccttctctccccaccccctccaagccaaaatgtcagaaaagggcctggtttccctttatggagtgcaaaataaacagatcctcagcagcaggagaggggcccagttccccagcccataatgccagagctgggggtgggggtgctgtggggaaaagcagttattcttctgtctggttagtatttggcattgactttcattttctccaacctctgttttctagaagcctgcctgtacgggaagtacaggaataaagagaagctgatcgtgggggttttcttgccagacttcaaaggaggtggatttttgatttttgatagtttggagagctagttccaaaagtaaaagctgctttggggacttgaacctagacactgggatcttagccgtgtgcccatcagagccgctgctctgctcctgatggaatggagtgctctgggcttcccactctcctctcccagtccaggagggctggagctctgggcatctcagggtcagctgcggtgagcctggccacagggctctgcattccttctgggctttgcttggtttgagtgggtgtgaccgccagtttactctggagaaaactgagacaaagagtctaaattgggcaggatcttgaatctaatgacttgtttacagaccctgtactttttccagtgcagggaggaggaagaaggcagggcatgctcgtcactgtgggcatgggcacattgctgttttcatcctaaggaggtaggacagcttcagaaagcagcagggcatctgcctggcagccagcaggcaaagtggcatgctgtgtaattttccaaggtagggaggaagcagtggcggcttctgcttggtcctaccggcttggcttccggggcacacgctgctctggggagaatgcctgaccctgccacatgaaaggccttgcttcctcccacttcagcttcaagcgatggggagattaccctcctcacccctgctccaagtgcatcacaacccagagcacccagccaagaatgcacacctgtgatggggctaaggaggcctcactggacctgtgtaaggagagaggagattcccaggaggacctcactaatagaaaagcacacgcatgatggttttgctatcgtgtgacatttatttcatacttgctacctgtaagaaattccttgaaaacgaaatagtatatggcaagatttaaggacttgctcttccagattctggaggtccttctggagcccagggatgctgtttctaaggcatgtaggtgctgagggtctaccccaaagggcagtttgggactgcagggcaggcaggaagtgcctttgtttgtgtgcatgccaggcggtttataaacatcccctttacttcccttgccaacccaggagtatatattgcaattaccacattctgatgaggaaactgaggctcagagaagttaaatcattcactccaggccatacatctgctaaatgtgtcatgctacatccactttgcacctagtttgaacaggtttacaaagcaagtcagtaacccctgcatgcctgggtgcctgaagttgaaaaggggtggctctaagatgtggtctactacctctcctggactgttgcagttgggtgtggctgatttgaaattgtgcttcaaaagaatgagttctagtccctgaatagaggagctcacaccacagtgcactgtagatctttgtgatccagaagtcctccagatgttcccaaaaggatctctaaggtgttgctggggatgttgtgtgtatagggagtgttcccttgggggcctctgagccctcctggcagagaagcctcatagataatggcatccccagaaaactctacacttggaatgggacccaaattaaatacagcaccagcaagactaactgagccactacctggaatatgtcaagatacagcaactaacacttactttatgtttgtcatttgcaaaccctatcatgtccgttaatccattcaaatgctgagaggtaggcagggcagctattatgattcaaaaaagaggccacatctttgtggatttgggttctaatcccagctcctgccgtcactagatgtgtgtggtctgagcaaatccttccacttctcctaaccttagtttcctcatctgcaacatgagaaacttgctttccaaagtgcctcaagctatgggagtggggatacgggaatgagtctccccaacattcagaggctcccccagagctggcagcccaaggcacaccactaagtgccactgccttctcctcccctctgctggccggatactgaccaatggagaaaccaggactggggcgggaaggagtaggtggtaagattctttttcacttgtttcctgcacctggagacaacagcaagaccattatttggatgagttattgtttagagt

SEQ ID NO: 604 - protein, 247 aa, Homo sapiens [sequence omitted]

SEQ ID NO: 605 - DNA, 744 bp, Homo sapiens
  source 1..744: mol_type = genomic DNA
atgcaaccaatcctgcttctgctggccttcctcctgctgcccagggcagatgcaggggagatcatcgggggacatgaggccaagccccactcccgcccctacatggcttatcttatgatctgggatcagaagtctctgaagaggtgcggtggcttcctgatacaagacgacttcgtgctgacagctgctcactgttggggaagctccataaatgtcaccttgggggcccacaatatcaaggaacaggagccgacccagcagtttatccctgtgaaaagagccatcccccatccagcctataatcctaagaacttctccaatgacatcatgctactgcagctggagagaaaggccaagcggaccagagctgtgcagcccctcaggctacctagcaacaaggcccaggtgaagccagggcagacatgcagtgtggccggctgggggcagacggcccccctgggaaaacactcacacacactacaagaggtgaagatgacagtgcaggaagatcgaaagtgcgaatctgacttacgccattattacgacagtaccattgagttgtgcgtgggggacccagagattaaaaagacttcctttaagggggactctggaggccctcttgtgtgtaacaaggtggcccagggcattgtctcctatggacgaaacaatggcatgcctccacgagcctgcaccaaagtctcaagctttgtacactggataaagaaaaccatgaaacgctactaa

SEQ ID NO: 606 - DNA, 4514 bp, Homo sapiens
  source 1..4514: mol_type = genomic DNA
gcattcagaaaagaggtggactctcacactaaacatttgtaactaaataagggatgttagaaattctctagaaaggaagctatgataataaatgggttgctagatgggtctagtagatggtggccatgctttgttactgccttgtgtattgtgctaccatagccctccccaaactgtactctggctcctggcatttccgtctcttcaaccagatggtcagctctctaagtgaaggagacacatctccaacatgcttggttctagcacaacagaagggctcaaacacatacctgctaaagaaactatcctgatggatttagcagcatggccatgaggcattggcggttctatcactgggaactcaggtttctggtgctccagtacctctactggctgataccacatcctacaattcacttcataggcttgggttcctgctctgggctgaataggtggtccactctgagtcatcagctgtgggtgatgatgtggtcactgcatgattctcacacaagcacccagaggacgtcatcaggcagaggcagtgggggtgggcagcatttacagaaaatctgtgatgagacaccacaaaaccagaggggaacatgaagtcactgagcctgctccacctctttcctctcccaagagctaaaagagagcaaggaggaaacaacagcagctccaaccagggcagccttcctgagaagatgcaaccaatcctgcttctgctggccttcctcctgctgcccagggcagatgcaggtgagtgaccgtctccaccctcgggggcccaaccccatcccacaggtctcctgccctttctccacattcctgatccatctatctaccaggaatgttctgaactccagctcccattctaccaagaccccccaagtgtgatgctggataagctatcagcaggaatggcagagcagcaggccattctcaagaagagccagtgggtactatcccttccccagagcccacctttgtcacctggagagtaggactttcctagaagtaaatggcagaggatgggaaactagaaaagagaaatattaaattattctagagtaggcctggcttctgtttctgggataagacaggtgcttctctcactgtctacttaggagagaaacccagagctcagctgacagcagaattggtacaatcactgtcctcagaacactgttaatgtgtttgctcagtcccattctccaactctgcttttcttccctggcctttggtggctcccctctttccaaggatgaggcactacggcaggccccagcttccctgctttctagaattccaccagcactgctctaccagccctcatccagaggctaactggagccagtccatcatgcagccatgaacatttactgggcacccactacatgtcaggctctaggaaacaggatatgacagtatctagatccctccacttacaccctggccattagaaagcagcactatcctagacaccacaggactcataagggtcttggaaactcacctgaaacaaagcaaagtcaggagaggaatgatcaggagcctctgggatttcactgtccctaagacaggtatgctcgccttcaactacatatggaagaaagatttacagaccaaagtctgctgttcttccctttttcagagcaggaaattgaagccccttcctccaggccactcccaactccaggctatcccaggctcccaaatgcccaggagttctggagccactaagcaggtgcccacccagcagattccatgggtgcccacaagcagacagacttttccttcaggggagatcatcgggggacatgaggccaagccccactcccgcccctacatggcttatcttatgatctgggatcagaagtctctgaagaggtgcggtggcttcctgatacgagacgacttcgtgctgacagctgctcactgttggggaaggtgaggagcagaaaacagcccacaccctcctggaaacactccacagagacccctgccttcttcccaaggagctccctgggctcctgtgaacacacatgccaggaggtctccttagagggtgagaaaagggcagttaagtttgtggagagaggggaaggttggttccagaggtgctgctgaagtaagaaacagcagagtgaccaagcctgccatatttagaactgggggcatactttggcatagaatacaaactgaagcaattccacctgtgtttctagggggaaccgaaccctgagaaacctggtgcaattaccagaattccaattcctggggaccgactgtccccttaatttcccctcagctgcagccctgccccagctgtcacctgctcttcactgtctctgggctgtataccctgtgactccacccccatcctcactctgctctctgtgcagctccataaatgtcaccttgggggcccacaatatcaaagaacaggagccgacccagcagtttatccctgtgaaaagacccatcccccatccagcctataatcctaagaacttctccaacgacatcatgctactgcaggtgaggcacactcctgccactcttgctcttcttggtccagttggttccactccccctggaatgccggcccttccctcctttccatcctggcctcttggttagttcctatgcctcagaggagagggaagattgtgcagccccatcactgtgtcggggcccagaagttcgttggctgacctggactttcttgcctcttccccaccagctggagagaaaggccaagcggaccagagctgtgcagcccctcaggctacctagcaacaaggcccaggtgaagccagggcagacatgcagtgtggccggctgggggcagacggcccccctgggaaaacactcacacacactacaagaggtgaagatgacagtgcaggaagatcgaaagtgcgaatctgacttacgccattattacgacagtaccattgagttgtgcgtgggggacccagagattaaaaagacttcctttaaggtaagactatgcacctgcctggattggctcttgggagaaagatgtttggggaatatctgagacctggagactcaagtagtgggggactccttcacccactagactgtgatatttctctctggaaagagaagaggggactagactgagctggggagaaattagggcctctgcaaacttaccaggaggcttatggtggatggtgcttctttggaaggatgaatttgcaacactccacccactccaggtcacagatattaggaaactgtgcccactgggggtgcagtaattataaccaggtgtgtcttcagaggctggtacccaacgtggttaatgggctggtcctccatggtggacatcagccctccttgcccacttctgggtccttaaacagccaacggtcccacatacctccgatctcaggatctgggggacatgacggaggctggcccctgggatgaggtgaagcagtaacaatgtccagggccagagcttggcagctgggggccaccagcggcctgccctgccctctggtctcccacatgtaggctgtgcaagttggccttttctaaaagggggcttgagatggaagagagggcaggacccggaggagcatcagctcagtccttccactctctattcacagggggactctggaggccctcttgtgtgtaacaaggtggcccagggcattgtctcctatggacgaaacaatggcatgcctccacgagcctgcaccaaagtctcaagctttgtacactggataaagaaaaccatgaaacgctactaactacaggaagcaaactaagcccccgctgtaatgaaacaccttctctggagccaagtccagatttacactgggagaggtgccagcaactgaataaatacctcttagctgagtggaaaagctggtttcttgtttattcattgaccctcattctcaggcaccacatctgcgctatgcaggccaatgacacaattttgctgttttctgctttctcctctcccctcaccccttgccacctccccaaacccccacatgaagctgatactcagctccttcctatccacaccagtttctccagggcctgcccttctgccaaggctgaagctgagcaccatcaggagacaacatggaccactttggtcctggggctttgggtaaacttcttacctccttctccagtgttacatgacagagaaaaaagggataataccatgggacctaactcctcatcccccactggggctcctcattctcccctgggcttagtttctctaccctcctctgagctcaaggctcagctcgtcctccagcctcttggctgccccttctcttcatccctgctgagtgttctcagaatccaccaactcttgtcctctccagaccacactgatctgatctggcccctccctcatatctacccacctaagatacccagagacccatgtggttccataagggccttgccactgagacgccagcccatctcatgccctggcagag

SEQ ID NO: 607 - protein, 119 aa, Homo sapiens
MKALSPVRGCYEAVCCLSERSLAIARGRGKGPAAEEPLSLLDDMNHCYSRLRELVPGVPRGTQLSQVEILQRVIDYILDLQVVLAEPAPGPPDGPHLPIQTAELAPELVISNDKRSFCH

SEQ ID NO: 608 - DNA, 360 bp, Homo sapiens
  source 1..360: mol_type = genomic DNA
atgaaggcgctgagcccggtgcgcggctgctacgaggcggtgtgctgcctgtcggaacgcagtctggccatcgcccggggccgagggaagggcccggcagctgaggagccgctgagcttgctggacgacatgaaccactgctactcccgcctgcgggaactggtacccggagtcccgagaggcactcagcttagccaggtggaaatcctacagcgcgtcatcgactacattctcgacctgcaggtagtcctggccgagccagcccctggaccccctgatggcccccaccttcccatccagacagccgagctcgctccggaacttgtcatctccaacgacaaaaggagcttttgccactga

SEQ ID NO: 609 - DNA, 2776 bp, Homo sapiens
  source 1..2776: mol_type = genomic DNA
caatctcagcgcctagcgcaaatctgttttcttcattgtaacctcagcttcaccgcaattaattttttttccctctggtcacaagataattcctgacgccagtgagtctggaggtcagacgaacagcaaattggggaacaaggcggcactaattccttacaagtttcccttgaaaaatctttcgcttaaaaaaaacggggggtggggggagcttctttgctgttcagggatttatgacctcggaggagctgtggctcgaaccagtgttgggctaaaggcggactggcagggggcagggaagctcaaagatctggggtgctgccaggaaaaagcaaattctggaagttaatggttttgagtgatttttaaatccttgctggcggagaggcccgcctctccccggtatcagcgcttcctcattctttgaatccgcggctccgcggtcttcggcgtcagaccagccggaggaagcctgtttgcaatttaagcgggctgtgaacgcccagggccggcgggggcagggccgaggcgggccattttgaataaagaggcgtgccttccaggcaggctctataagtgaccgccgcggcgagcgtgcgcgcgttgcaggtcactgtagcgggacttcttttggttttctttctctttggggcacctctggactcactccccagcatgaaggcgctgagcccggtgcgcggctgctacgaggcggtgtgctgcctgtcggaacgcagtctggccatcgcccggggccgagggaagggcccggcagctgaggagccgctgagcttgctggacgacatgaaccactgctactcccgcctgcgggaactggtacccggagtcccgagaggcactcagcttagccaggtggaaatcctacagcgcgtcatcgactacattctcgacctgcaggtagtcctggccgagccagcccctggaccccctgatggcccccaccttcccatccaggtaagcctcgaagtcgggacagggctgaacacccaggcaaggatgctgcgggaccctcggagctcccgattgcctcgcgtaactcttccctcttttcctctaatcagacagccgagctcactccggaacttgtcatctccaacgacaaaaggagcttttgccactgactcggccgtgtcctgacacctccaggtgagtatctcctctcttggagagggaggtttaaacggcaagtcctggagttggcagacgttttgaaaaattgccactcactcggtttagggaaactgaggccagagagggacaagtgacttgcccatggttgcatcaaatgaatggcagagtcagtttccatgtgatgtgcatttaagccttaaatgcgcctgggccctgccctcccgcagtggccgagggtctggcaaagtagacatgggtccgactaaatacaagtctttctgttccatgttgtatagggagctgtcttcggcagccccctcccagctagtgtcaattccaagtaggaggggtagcgcaagctccgcctgtggtctttggcgccaactgggtgggggcagcgtggggcgcggagttatcagctggaggtacagaccaagtttcctccctggcgccggccagtctgcggacggcccccgcctcggcacgctcggcggaaactgactgctccttggtcttctttcctcccccgcccagaacgcaggtgctggcgcccgttctgcctgggaccccgggaacctctcctgccggaagccggacggcagggatgggccccaacttcgccctgcccacttgacttcaccaaatcccttcctggagactaaacctggtgctcaggagcgaaggactgtgaacttgtggcctgaagagccagagctagctctggccaccagctgggcgacgtcaccctgctcccaccccacccccaagttctaaggtctcttcagagcgtggaggtgtggaaggagtggctgctctccaaactatgccaaggcggcggcagagctggtcttctggtctccttggagaaaggttctgttgccctgatttatgaactctataatagagtatataggttttgtaccttttttacaggaaggtgactttctgtaacaatgcgatgtatattaaactttttataaaagttaacattttgcataataaacgatttttaaacacttgtgtatatgatgacacccgtctccattaagtactaatgatgctttctcgcacatggccgaattttgggagctttgggaaagtgaacttgcttattctacgagagggaaatgaaaaactgcctggttgagaggggatggggtggagagagaagggttcatgatgggagtctcatgtccattgagggatgggtgcagagaaaagttctgggctctgctcattatttcagagatgaaaccagagactggtgcaagcttgcccagcaagttggtggctcaggcaacttgaaagttggtggctcaggcaacttgaaaactgagttttcatgtcccttgagatctagcagtagctttcctctttattgttactattgactatgcctttctagcaggggatgtggtaagaggagagcctcaagtttgcttcacctggtgcccaggcatgggtggtggttgatagaccaattccaaaaatgaataaactgataactgggcctggtttcatttccttcttgctctctgggctggcttccttgcgggcttccaaagttggaaaaaagagggaggtctcctgaaatggataaagatttggatgctggttgggaagt

SEQ ID NO: 610 - protein, 500 aa, Homo sapiens
METEAIDGYITCDNELSPEREHSNMAIDLTSSTPNGQHASPSHMTSTNSVKLEMQSDEECDRKPLSREDEIRGHDEGSSLEEPLIESSEVADNRKVQELQGEGGIRLPNGERPFHCNQCGASFTQKGNLLRHIKLHSGEKPFKCPFCSYACRRRDALTGHLRTHSVGKPHKCNYCGRSYKQRSSLEEHKERCHNYLQNVSMEAAGQVMSHHVPPMEDCKEQEPIMDNNISLVPFERPAVIEKLTGNMGKRKSSTPQKFVGEKLMRFSYPDIHFDMNLTYEKEAELMQSHMMDQAINNAITYLGAEALHPLMQHPPSTIAEVAPVISSAYSQVYHPNRIERPISRETADSHENNMDGPISLIRPKSRPQEREASPSNSCLDSTDSESSHDDHQSYQGHPALNPKRKQSPAYMKEDVKALDTTKAPKGSLKDIYKVFNGEGEQIRAFKCEHCRVLFLDHVMYTIHMGCHGYRDPLECNICGYRSQDRYEFSSHIVRGEHTFH

SEQ ID NO: 611 - DNA, 1503 bp, Homo sapiens
  source 1..1503: mol_type = genomic DNA
atggaaacagaggctattgatggctatataacgtgtgacaatgagctttcacccgaaagggagcactccaatatggcaattgacctcacctcaagcacacccaatggacagcatgcctcaccaagtcacatgacaagcacaaattcagtaaagctagaaatgcagagtgatgaagagtgtgacaggaaacccctgagccgtgaagatgagatcaggggccatgatgagggtagcagcctagaagaacccctaattgagagcagcgaggtggctgacaacaggaaagtccaggagcttcaaggcgagggaggaatccggcttccgaatggtgaacgccccttccactgtaaccagtgtggagcttcttttactcagaagggcaaccttctgagacacataaagttacactctggagagaagccgttcaaatgtcctttctgtagctacgcctgtagaagaagggacgccctcacaggacacctcaggacccattctgtgggtaaacctcacaagtgcaactactgtggacgaagctacaagcagcgcagttcactggaggagcacaaggaacgctgccacaactatctccagaatgtcagcatggaggctgctgggcaggtcatgagtcaccatgtacctcctatggaagattgtaaggaacaagagcctattatggacaacaatatttctctggtgccttttgagagacctgctgtcatagagaagctcacggggaatatgggaaaacgtaaaagctccactccacaaaagtttgtgggggaaaagctcatgcgattcagctacccagatattcactttgatatgaacttaacatatgagaaggaggctgagctgatgcagtctcatatgatggaccaagccatcaacaatgcaatcacctaccttggagctgaggcccttcaccctctgatgcagcacccgccaagcacaatcgctgaagtggccccagttataagctcagcttattctcaggtctatcatccaaataggatagaaagacccattagcagggaaactgctgatagtcatgaaaacaacatggatggccccatctctctcatcagaccaaagagtcgaccccaggaaagagaggcctctcccagcaatagctgcctggattccactgactcagaaagcagccatgatgaccaccagtcctaccaaggacaccctgccttaaatcccaagaggaaacaaagcccagcttacatgaaggaggatgtcaaagctttggatactaccaaggctcctaagggctctctgaaggacatctacaaggtcttcaatggagaaggagaacagattagggccttcaagtgtgagcactgccgagtccttttcctagaccatgtcatgtacaccattcacatgggttgccatggctaccgggacccactggaatgcaacatctgtggctacagaagccaggaccgttatgagttttcatcacacattgttcgaggggagcacacattccactag

SEQ ID NO: 612 - DNA, 32706 bp, Homo sapiens
  source 1..32706: mol_type = genomic DNA
aaaattacctacagagtggtgcttaaggtactgttgatgacttaatttccaatatatctttttttctcagcagaaaaaaaaaacctcaacaactatttctgggattcttcaaaggagtaagagtacggtgcctgttccgactcttctagcattgattttcttcacaatctgtgatatggtttctcaggaacaccgtttggcagtcctgataatttcatgtgttttcaaatttcagccatccagactacacagttcactattttcagctcctttcattttccttttccctttaattatagaagtctctattccctcttttcgcaaatgtggtcaggaaagatactaaatgctactatttgtagaaagaatatgcatttgtttttctcttgacggttcacttaagttctttccaaataaacaagctgtggttgatagtgataggtaacacttcaagggtagcaactttttgtactcatccgttcctttgactttggaagacgtggcacatgccccgggggagaaaaagcaagtcaacactttagtttttaaacttgcactgttaaagcactttcaaaatagtaatagttgagcttcatctcagacatgaatgtctttctcagtctattccccaggacccctcttatcccgcttcaggtcccggtcaatgcggtgcgctttccgaaatggggccgcagagttgccggcggagaccagtaggtgggaggctccacgcacactccccgactcggccgggacgcggctcccggactccgcgcagggcgccaagatcgccgccccgctcccttcccccggcctccccaccaatcccagtttgaaagaaaacttcacgcggccgaaatgaacgtcacctcaccgctccaagcctccagccggcagaaaacgtgagatttattatgacacggggaggggagatgggggtcgccgtggcacactcggaagcgggttacctggcccccgtcgggggcggggtccgcagtccggggaccaacgggctgggggcgacgcggccgggcgcgcgggtgggcgcgagggagtgcgcgcgtcgcggagcctccggggcagcacttgtcctgtaatcgattgccgagcgcgccgagcggcttagcgcgcagacacgcgcacacgcgcccgccagcccgcgcgcgcgcgcacacgcgctctcatacacacacgcacaggcgctcgggccccgcacacacgcacgcgcgcgcacgcacgtccgctcgcccgcgcccggggctccgctgcccgccgccagccgcccgccgccgccgccgccgcagccgccgccagcccgccctccgcccgcgggcgtctgcgcgagcccggccggcgggggagatgtgctcgggctccaccggatcggtttctcggggtttgaccagctgtcccgggctaaccctgctcctcgctgaagatggaggaagtaaaaacaggattacccttagctacagatccactgccttagtttccaccaccaactgcagtgcacaaacacacgttaggcacaggaaagaaagaaagacagaggacacattaacagtaaacacaaacaaaagggtgatgggattattttactgcatgcactgctgaggtaaatctccgcttggcttttgcgtggtgaagaacagctcttgttttgtcttctgattcatagattatatataaatatgtgtatgatttgcaaaggggggagtgttttcaaagttaagtgtaattatatagcatctcgttttgcactgtgatgtgatcaaatgacttgttgctgttaaccagtaataataataataatataggtatttttctctgggagggatggattgtggttctgattagggtaatgatttttgtaaaggacgctcagggaatcgggttgaagatgatgtcctctgccttaatttatcgtcccctccttgtaatctgtttctgggatgttaatcgattaatcagttctcatctctatagctgtcatgaatttggacttgttttgctttgttttaacttgaattccaagaagaaagattgggtaggctggaataaattgaagctgtccagatagaaggtaatatccagatcctgttggaattaaaaaaaaaaaaaaaccaaaaaccctggtatgacacatgtaaacaggcagcagttaaatcactttgacaggttctagtatgggcgaaagagatggaattaagatttatttattttttttcttttttgccaagggccaaaaacagtcctgtgaagttggcctgggttcctagctgggttctgcctgactgtccctcccctctacccgcccccccccccttttctttcagttttcttgtcttagcttttggtcgattcttaaggaaccggtggatcaagttttttctcttgttaatcgcattgctatagcactgactgacctctctctctctcttttttttcctctttcctgaaagtacgtggtgccattcctgagtgacttttcctactagaccatccctaagggacgagggggaggggtggaaggaggaggaggaggaggacgaggaggaggaggaggaggaggggggtgttcttctctctcatttcttggttttgtttatcagccgatctgtttgctggatttgggcttggaatgacccacctgtaaagtgcttttccttcctcctccccttgaactctgcagggggcttggcttggagggggcaagggagggaaagagagaagggggaaacacaaaaaacttctttctttctccctccgtttatcttcagcccgacattgtcacctcctctttgaggggttagaagaagctgagatctcccgacagagctggaaatggtgatgaatcttttttaatcaaaggacaatttcttttgtatgtacatttcgtttctctttctcctttttctttttccttctttccttctctgagggttaataaccatttcattgatggggcagccttctttcgcttctccctgacgtttctttctttttaatatgtgtgtgttaaatgtgtacatttttaaagagataagctcatttgtaaaatatccgaagaaactgctcctcttttaaactttacggatctctttctttaaagccttatgtaatcataatttaaaagaatgtgataacagtacagcaggttgaaatttaagtgctatgtagtgactgagttgggaatttgatctgattattccataaagaaagaaataaaagtttttttttggggggggggtaagggagtgtggtggtgaagaaggggaggggagggagaagggaagtggttttggagacaagaagtgaagctgcctgttttccagtaagtaatggagaaattccaggagccagggctaaatatacttggcgatcaatacagaaatggctcattgtgaataatttagctgctggtgcagtgagagttttgaaactaaaggcaaaaaggaccaaggccaaagggggaaaaaaaagtaaaaatcttctcaggacttgtcaattcttaaacttttttccccacagaatacagttagattatcgatcttttcattatgtgaatcaaagctagggggtgtcatctcatacagtttacttttgtttctgagaattatgttctgttgtgtggcgtttgtgcatgagaataattgcccaaagttttttttttttttaaatgattctctctagcacaaccaaagtttatgaaattttcaaaatcagactgtattaagtaggcttggcatttgtgtccaagcatggtctggcaggaaattaaggttacattgaacaggtgcttacacagaacttggggtaggttaaaatgtcaatacaagtcagggagttggccaactgctgtagaaatcttcaagacaccgttgggcactaagttttttgttttgttttgttttcttatgtttgtttgtcctccccctccctattagaacatgatgaaccaacttgcaacaattgtgaatagagctatctgtatactggggaagtcctcaaactgcagtgtgattgtgggaagtagtgaatggtaaaacacttaaatcccagttaaagctgacacatttgagctataccccctattttttcttaaacccaataaattttgattaagagagtcattccctttttgctctagcccatctcacagcacacttatctttcctatcctatctccagcaggaatcagatcatttgcagaaagagttcagtgacttgcaaatgagcacatacagtacactgtgtatgtttctgggcacaggtggcagcagcaacatggactaactgcttggagcttcaaataagttaagaatttaatggcagatactgaaaggaatcattgtattaagggtataatcttttgttttgcagcattgcactttgactatggaaacagaggctattgatggctatataacgtgtaagtattagttttcattgatttgttattggtaataaagttgcctttgtattacctgtgttttaattcctggattatgaaactttattgagaattctgtactcttttttctctctgttcacaatttcacctttgaatgagtttgagaaaatgacagcactgaagtgaaataagaaggaaatatagaaacatactaagttaagtagtgtacttaaatcaatagtagctagcagttcaacactttcctactttttataatttactttgttgtaagttgagaataggccaggtttcatatatgtctattaatatggtgtgtactaaatatttacttctctgtaacctaatttttcagacatattatgtgaaagagaattagctttcctaacttgacatttctttagctacctgtcttttccatcctctctctgatagccagcattttggaaaatgctcattataaattctgtgtgcttaacaattaaattagatgttaaaagaaaagttatttctttcaactgaaagatactttagaaatcaacaacttatgtattgagataataaagttttgttaattttttttattgtgggttgattatggcttctcatcatttcattcaactgtatatttctaaatgatatttccttatagtttctaagggaaaaatgtattaccttacagtttgaaggctatgcatgccattgcgtgtataaagcaaagttagtaattacatcttatgtgacaatgaatagaaaccaaaagattatattttgtgaaagcaggtgacaatgagctttcacccgaaagggagcactccaatatggcaattgacctcacctcaagcacacccaatggacagcatgcctcaccaagtcacatgacaagcagtaagtcttcattttatgatttttttttgtgtgtgtgtgtctctccagcaacagactttaatttgttaggtctgtggggtcctctcacattgtggtatagctactgttatagattttgctaaagaaagaacaacacagatttattcctgttcattctagtattataaaacatgagcctgcttactagtctgaactatcccaaggtggcatttgggagctggtgcttacctgtatcaggtaagaaaggttagaatttgctggttgttgttttgacttgccaggtttatgactggattttttgttgttgttgggtaaaaaatgtggaaacgtcacttccaaaggactcttcacagttaaaaaatgaaataattttatgttgccttggtagaaagctaaaccgtcagtgataaaattacagtgttacttgcttttaaaaaatgtgaaagtttcttctccaaagcattggaagtgaagtgtaattgaaaatttatagaactcatttatatccatttctgtagcaaagttgaaaggcttttgtccagagaagaactgataaaatttggaaagatgttttgaatttgtaggaaaagacagttttggctactgtttttgataaagggtcatttactgatgtaatatacattgtttttatgtaataagatgcaacttacatgctgtcagtgacagaagacaaaatactttattaagaatatggttgcttttttcttaattataatattttatcagtttagttatcaagtgcaagtgctttattactcttactcaaaagtaatttgaaatcttgttttctttatactttagatttatattttattcttacatgttatagaaaggacattggacttacatgtaaatataattaaatttacaagttttctgttttggcaatatgtgaaggaaaggcattctctttccttccccccccccgaagatttaataactaagaaaagtgaatcatgtacttaattatgagcatatttgtaaatgtattctgactatccagagagagcaactttttctttttacttctaacagctctcgaaactgtaagttattataaaactgcaagcttagtaattagtaaatactactgaaatttaagcaatttatatagaataccattgaatacattttgcaatttattaactttaagtaattttagctattgacttgaaattatgattgagtttgaatttgctttatttatttaaaagttgtaattcttttaagtaatgagcacttcctaagaaaatttaattatagaagcagtccttacaattcccgtatcatttagaaagaaaaaactagtaaagttagcaggtgaatgtatactaaattatcatactaatctcataatgaatcttttgcattcatgttttttgctagttgatttgataaaaaatatactatgactacaatttaggcaatagaatttttacatttcaatatactagttatttggtgtaatgtttttatttctcagataactcacacaatttcctaaagagtaaaaagagataatatgtagtttctattagttagctattggctttagaaacattgcatgtatagggtagggagtaactgttaatcagagacttgactgtcatcccctagacacaaccacaggaaaatgcttgtcaagtggttaattggctgctttatttctgaatttgattctggttttgcaagtacttgcttcagaaaggcagttcactcatctttttaaataaacagtgcagagtgtaggcatgatcaatttgaacaaataagaactgtgcttttgacatttgagcttttctcacccaacaacagtaaacttatgtttggtagagagttttttaacttactagcctgtggcaattccatgttagtacaggttttggctaagatgcacgtgttttcaggttcttttccaaagagttgcaggttaaatattttggctctcacttcagagctgtctcttgcatcctttatgtagcctctatttacagtatctaggttacccacttaggtgttagatggagaagatacccatttttcctctctgttagatctaggagaatatcagcattttagattgccaaagcaaatagtgatagagaggaactctcgtctattaattagaacaagagacctagaattggtcactctgatgtttttctgtgacttggaataattttttgtgtgcatctggcctgtcaaatcacttgtgtctgagatcaccggttttcctaaatccctttacatgcattgttgactttgtttaatgaaaagaacttatttattttctgcattttttaatatcttcaaatatacttcctggagggtgcctgcttccaaaaacagaattgcaattttgattgaaagtgttaaagctaaaagtaaatgtgaaaacctttaagacagtttctagtagcaggaaggagaggatgggaatatatgtgtaaggaggaaaaaagttatttttaaacagttaaaaaaataaaataagtaaattttttttttttttttagtaaaacagctaacattctggccagaaaagtatcaataaggcatgagagctcacttattttggctttaggaaggtggtcagtactactgtaaggtcccagcatttgtttaagctatttggtaactcttctaagatgaagggtttctgtgcaacttgctgccagctattgtataaaaataatgacggcagctatcattatttgacagtgctagaatagagcactggtgacttgggagggagagaactaaaaatgttataatgcctgacagtttttggttttaaaatttagcatctaagataaacttaagaagaagtaagaggtattagtgatcctaacattttataatgactacttcctatggttttgaatgaattttcttagagaactttaaactttttcttctggaatgaggatgtctttgttaagaagatggacattgttgcctgagatcattagtgtacatattgagtctgctgacaatcttcggtgtcagggatgacagtatatgccttgatggctattggaaatacacagtgttaagtgatttttaaaaatagaatctgggacttaagaatctgagacagacatctcagacagaacaatataaaaataatccatattgtatttcggcccatcagatgaaacttactttgtgattccttctgtttcttggttagctcatttccaattcttgcatagttgttcagtattggtttcagactgttctatactggcaggtgactattttgaaaattgtttaaagttcaaaatttttaaattaattttatttttcttatctatttttttataatgtttatgtataaatttactttgcaggtagttacttaaatgggtatgaaaatacatcatgatgcaaaatttgtttctattactttaaagctgttaagtggatcaactgtacagtcaatgctatttatcagtctgatggccaggtggcatgtatggaatcggaagaagtagtaagtctagttttacaaggctctgaccaataatcaggtcagggaatctagtttattcttttcagagtacttcacattaatttttttcttagctagtttccatttttagaacctagcgaagcagaagtatattatgatttctatttttcatatgtggaaattgaggcttgaagaaatcaatttacctcttagagaacttagcagaaagatgaagttatcaggattgggacataaaattgtgatattaccttgtgggttagttagataactgctatctctacaatgtcaccttctcagggtgtctgccgtgtccaatactggcccatatttttgtgacaaatatctcagaaatagaagagttattatgagggtggagtgatatcagattatcttttcaggcgggtgttctaatgcactttttgaaatagagcctatattatgggacttaccagctttctgagttttcttctgtagcttagtttggcagtcacccttgcttggatttctgtaggacacaccctaatataacaccagatgggcttgatagaaaatcttctgttttaagtcgccatacttaggtttgtgtatatacccaatgtactttacatttagttcttgtttattagggaattaaataaaaatagttctgatttaatttctttacaggtatcagagataaatgtcataactatgtaccaaaagagaaaaaaagggaaaaaaaaggaaagtaaaagaggtatagatttgttggtaatcaacagcaaaagtgctgtaactttttctttgcacctcattccgctcccaactccctatctttttagtctgcttagtactgagaattaaagtccgttttcaaaaaacaaaacaacgtatggcagaaagattatccttatcatctctatctttgttcaaaatctgtctttcccactagaagtacttttttaaaaaaaggtaacaccattgattgtgttctattgagagtcttcctgtaagccataatgaattttcatctctgggttccgtgctcttctctcctaacttttgacatgttgatatattttgaatatttacatatttttatcatatttggaaatatcaatagcagagttccagtcctaaaatgaggtagaatatgttgtttttctttacttttttcccttcttatctgtttatgttaaatgtatttgttggcctgttggtattttccttttgcgaattaattgagacccaatatacctctgttttgatataggtaaggaatatttagggatggtttcctttattataaatgttataatcaccactagagcgagagaaggtagaggggcatcctttattgagtgcacttagtatgctagatgctttacttattatttcactttgtctccacatcaattctgtgaggtaggcatgtaattactctattttataacacttaaaactgaggctcagaagcagtagactgtgagtggttaaaaatatgggctttgcaattatgctggcctgggttagaattcctgctttgctgtgtgaccttggccatgtcacttcacatctctgagctccagtttccttatccgtagaatagggataagcaatacctacctcaatgggctgttgtgagatttcaataaggcaatacatgcaaaatgctcagcacaacttctggcacatgctaagactcaataaataatcactgctgctattactcagagcagtcaagttacttttttatggacctatgacttgtaagaaaaagggtttgttttcaaatccaagtctatttgaaatctgggtcttttgctcttttctgtatattgcacaggtccagggaagaaagatagggatttctgataatttagggtaaaaattgaagcaggaaccctccgttatttaaagcatctatgaagattttggttaagaaagaaatagagtttgtctatatgtcagaattggggaggggggtggcgctcaacattcctgagtatagttttgtggttttgatgatatgtaaagcaaatcactgcatattattggtgttccagatataccagtcattacaaataacaaaagaaaaaaattcccttaatagagtaacctattcctacagagaatcaattcttagagagtcctcatctaaaatctaacctcatttgatgcttctggtagtaccataaattctcacttgatgatacctaataaaattgttggtttaattgttgattgtgcacttcgggggtagtagtttagatgttctaaatttgaagtaggcttaaatgcaattattaattataagcatttgacattttgctgttcaattctagttgatcaattcaataaatatttgtgggatacctcatatgtgccaggtattgtaaggtgaatccaaaggtgaataaagagtatagagtccttttcctccaggaactcatactctagtgggacagacagacattaaatagggcattttactgtagtaagcttagtgtcttgattattacgggggatgagaggtggtgctcatttggaaatattttttagagggggagactgcttgagccgagacttattaaatgaataggatttaggagtaactggaaggccttttcaataaataatatatccacaataagaggtgagaaatagcatgcaatattctgggaaatacaagcagattggtatttctagactataaagttggagtctaggaattcgaggccaggaatgactttggagagttaatcaaggcaggataatggaacatcttgtatgagaggaaacttggcttttattttcatggaagtcaatggttttaacgaagtaggtgacttcagtcttttgactgacatggatcgatttgattacaatgtggggaaaaagattgtggatggggaccagtctctaggcaggtgcatatttaacaggctgtttcaatgattgagtgagaagtcatgcaagctagcagtagtgggataaaaaggaaggagaaggatctaggtaatatttagcatcttaaagtagacagtacttgggtagtagaattaaggagacaatagagtcaaggatggcaacctttaaattacgggatagatggtggtggtaggttctgtcagtgaagatagcaaatactggagcaggtttccgggaaaagatttagcttagttcaattctggtttgaagcacccacagggtacaatttgggagagggatagcaattaggcacatggatatagactgaagtatgaattttcctaattagtgaaaactaatattagcccatggtttggttacttttctgcccatattactttaacagtagtttaataccatattttgaaaacattcatgtctaagtaattctcagtatttgatcagtggccttatttcctcaattgccccattaaatcaaaattctatattgagttttatgtgcacaggctttaataaactctttgcttaatggaatcctttatactggtctcagaagttgaattaattgatgtgattgacccactgatttttaaacaaaaagctcttcaacattttgtggtatatctaatatcataacttctgttttttaaaaaaaatcataagattaatgtatgccatatactccagtgcctctattctaatgatctgtctttattctgtaacctgtttccttataaataaatatgctattgaaaatattacatacttattacaggttgttagctaaacattggccagttctgccacattaatagctaaggaatttaatactcctcaccagagcctttttgaagactttgagataaatatgcagatacaatatatattattttaaaatgattttgtatagaattaatattttaaaaatataatatcataccccttgggatgaggttacctagatgggacagtatagcatagataacatcttaatcagcataattattctgaaatatttattacagaattccatcttaaaaatgtaagcgctgactacccaagacaccatagaattccaaatgaatgttaatgctagaaacacttcttctgagatttcctgtatgtggagattcagaactccttagagagatatttttcatctttcgatcattgatccagcaaacatttattaagcacttactgtgtatgatgcattgctggtgctggggctcaaaaaataggtttggggtgttttctagagaaggatggtatcttcaagggtccaaatgaattgatattttgtgtgagatcgtaatactgcttattgcatttagaagtaaatgagtgtgatgtgctaactgtgacttacatccattatagattaatgagctgcttctcaccttttacctccaagagtttttcaaatgtgtgtaaatttgaggatgtacagtgaaacagacaaaagggcaacaagccacttagataggttctcagaggataacatttccccacaaaattatttataatgcaggatttggcactcatccttgcaagttctgaaactagatttgtggcacacttagagtggatctgtatctcaaggttgactgacattaaacaggtttacaaaactgatatttaaaatcagaatgccaatttatgtttagatattgattaaaaataaagcacacacacacacacatgcaaccaacaaacataggagctggatcactccagttggcttgactagatcattttgttcttgtgaactgacctatatgggtaatcagtaaaggtcatttactgagcaaggaatctgaataaagggagttagttatataattcaaatgtttaatggcattagactaagagaacctaatatattcagcatcacaatagagatagcattgctatttggataattatggttgaagtcctttgtccagttccctctccttttaatggacatggatttagattccctagttcaaccaaaatacttctgagattcatttttttttccccttggcttcctaggctaaatcccccagattcagtctgtaacctatattaatacatacaatcaggttacgacgagttctttctggcctgagatccattcattttctttagtgtgatttatatttctgctttaatttgtaaaatgttgattttatagcctaactttatgaagacaatcttatagtgcccataaaggatacttccttcaactactattgccataaattcgaacttccattcacagaaatctcgacagctgatgtggtcagcagtttaagagttcttaatatctattttagatgaagatggaaaatagcactaccacctaggaaagatccttaagttagctggtgatatagaggcacttccagtttataggtcagaaggaaaaaaaacaccaaaccagtctcatgaaattattgaagtgatctgaccgcatcaaatgagattttatagcaaactgttgtatttcatgttagttagtaggaaagctgtcttaattactgagtgtgaattaagtaacttttcaaagcatatagatttatttgtgggccacaccttgattataaagaaattaatcaggttttccagatgtgaatctttggggaaaatggtcatatctcttcatccctagcatatgcattgtatgcattgtaggagccctgtaaatatttgttgaatgaagaaaatacttaagattagcatattacatatgtctgtttaaatagtatgcttctgatctacttgaaaaaatttggaaacttgatttcttagttgttgaaataatccaaaaatcctaatttacttgtgattttctctgtttggggatgtgttatttttataatgtctcactctgaaaaagattttgtaatcttcaaattggtcccaaaagctgatctctaagtttctaaacagttcttatgttttctgattctatacaaccatgttcagtggaatccacatgaatgttaatgtagatgtttccatgacaccaccatcatcatcttcattactactattaatatcttgatatagcacatttaaggttacagatttaattccatatacttgtaattttaaagccagttctccatcacttaaactgtttttagtagcatgtacaagatggaatgcttcaattagcttttcttatgcactccagatattttgatgagtgtataattaatcagtgtgaagtcacgttctaataaattaacattctgggtgtctacacttttgacgtttttgtcattgctctcattatcattgaagctgtagttctccttacccttgtctatgtcagctctacctacttcttactaagacattcaacatgcaggacttgatcttattttgaagtgctagggtactacgttgctgtgttttcagttgaattaacagtgagaatttctggttgagttctaaataggcataatttcttctacaagtatataaaacattttctttcatggccattttcataaatatccttgttttgttgtttaaaaatacacattttaacaagtaatatttacatatggaaatatcttataggtcttctaatcagacttatgccaatatgcttattattcagatggtctgaagtagatgactttattttcaatacatctgttactttttagactgaaaagtggcatttctatagtttttagggctgaggatgtatatttaattcgtgattgtaaaaggtctatttctattagaaatgcttgctcagatcacccaaatatcatctaaagcttgaaaattgagctattcaataatttttaggtactaaaaataggtggtacctaatcatttttgtgtactgctttaaaatgacttacgccttaaaaacactgactcgaatgtagtatttggaaatgtaaaatgacttctattacattattacatttttgaaaactacttgaaagcagcaatagattgtgtctggacataactgagaattataaaaagaaatatgagatttttctgtgagtctgctgtttttaagttctcgaagcatgaatttacacactgccatctgtctgaattatgacacattaatgacctaatgatagttttagatttaatttttttttggaaataaaaacaaaaagaaacacccccgtacctcaacaaaacacaatttaaaataaattattttttacataaataaatcatagtaatgctgtttgcataaagttttggggatgcatttgaatagttttagttggtgttacattttgagtacaatacctgtaacaaatttgaagagatattttttcagccagagaagctatagttaactagacaattgatttcatacaactctatgtatatgataataccatttatgtttttaaaagcatatatgtgcatgtgtatgcgtgtgaatgtgtgaaaacaaataataagaacaagaaggaaacgtcaaaacttgatatagttgactttgggatatcggagggtaaacagggtgttttatattttattctaaatagttctacattctttaagtctcttacaaaaaataaattcatatattatttgtgtaatttaaagaaaagaccaatgaattcagtcaaccatcctctaaaagaaagtatggagccagaaaactgatagtagctctgattacatccatttaactttgaaatttcaataaaattatagactcataaaaatgatcagctgtcatcaatgataaatactgaaatcaggcattttcatgtacaaatgatatcttcagatttattgaatactattttactatagatttagtcaaaatataaggtattttctttttcttttattctttcttttttcttttctttttctttttctttttttttttttttttttttgagacagtgtcccgctctgtcacccaggctggagtgcagtggcgcgatcttggctcactgcaacccttcactcccaggttcaagcaattctcctgcctcagtctcccgagtagctgggattacaggcgcccatcaccacgtccagctaatttttttattttttagtgtagacagggtttcactaagttggtcaggctggtctcaaactcttgacctcgggctatccacctgcctcagcctcccaaagtgctggattacaggcataaagccactgcccccggctctttcttttcttttttctttctttcttttttttttttttgaaacggagtctcgctctgtagcccaggctggagtgccgtggcgcgatctggctcactgcaacctccgcctcctgggttcaagcaattctcctgcctcagcctcctgagtagctgggattacaggcatgccaccatgcccggctaatttttttttgcatttttagtggagacggggtttcaccatgttggtcaggcgctctcgtactcctgagcttgtgagccaccgtgcccggcattgtattcttttcttttcttttcatctcttgtcttgtcttctcttctcttttctttccttttcctttcttctttctctctttcttttcttcctttccttttttcctttttctttccttttcctttcctgagatggggtcttgttctgttgttcaggctggagtacggtgtcacgattatagctcagtgcagcctggaactcctgggctcaagcaatcttctcaagtatctggggctacaggtgcatgccaccatgcccagctaatttttaacaatttttttttagagtcagggtctcactatcttactgtgttgtccaggctggtcttgaactcctggcctcaagtgattctcccgcctcagcctcctgagtagctgagtttacaggtgtgagccaccacacttggctaggttgtttacagtggcatttccaaataatgttatatactctgaattgttttatgagtaatattcattcatagcatgaagtgtcatacactaaataatgtacatataaatattaaaatgacatatcaatattaaggagacattgtggcatctgatggcaaaagaaatctgagtagaatgagttaaaacatagattttcaattctatcttgcatgtaacaaacaagtttacttttaaaaaagagccttagtctctttttcatattcatcaatttaaaattccctcgaatgttgctaattttttacattaaaactattaaagagaaactatttttagcaagacaattctggtatgttgctaatggaggtaggacctgcgaaaataacttaaggcctataaaagaaagagcagagctgtgaagtatagagagcatagaagaaagctggcaagaagaaagaaagaataaaaataacagattcagaagtggaggacaagccacagactccacttgagttagtagatccactggagagagcaatagagcaaatgaaaaatagcgtcttttcctcccctttttctttcttcacaaaaaaataaataaagagaaatcagaatttataagtgaatcaaggaagctgcctgcttaagtgatgaggaatgtggcaataagattagaatggtttctggtagaagctaaatgaataagcatttagattcgggagaaagaagcatacttcttcagatatttgaaagccagggagtaggagatgggggtagattggttaaaagaactgggtcctaagggattgattctagaacaattagccaattaaagcaggataaaagttagtggtgcctagttattaagttatattagttataaaccagtgctattatcagtggccatcttggactaatctattgcttttatcttttgcaaaaatgattgtgtactatactgtgtgtgtaagagatatcctaactggtcgtattcctaaattatcgtggatgcggtaaactttgatcttgcccctcagttgtctttttactttagtttagtgggaaaggagattggaagggggttagggagactgtaaggctgccagaaagaactttctctgctttttttccccctcttgggagatggcaatgaagaaggaacttgatattgagcagatgagatgaggttttgcatccagtttttgtcctctgatcgctggtttttccattttcctctcgaagtgtctaagacacaggcactgagggttccagaagactttcttgagatcatactctgttatttagaaggctcaggttggcttttacccattgagacatttttaaaaaattaatctgctttaatactgtagtaaaaatttatcagttgtgagataaactttacatgtgtatcattgttgaagaaaaggtttactaagcccataaataacaataataaaaagatcagggtatatgtttaacttgcttaaaaaaacaaattttaagtctactaagaataccattttatttgtaaggtacttttttcaaaatgcttttacatctagcatagaatgtgctgatcaaaacttgagcttaatatttatgcaaccagtgtcagagtaatctactctttttgatagtacttagcattactggaaaatagtgaatatttattttatttatttatttatttatttatttattttttcgagacggagtctatctttgtcgcccaggctagagtgcggtggtgcgatctcggctccactgcaaccttcgcctcccgagaagctgagattacaggtacctgccaccatgcctagcaaatttttgtatttttagtagagactgggttttaccatgttggtcaggctagtcttgaacttctgacctcaagtaatctgcctacctcagcctcccaaagtgctgggatcacaggcgtgagccaccgtgcctggccagtaaacatgtttttaaaaattacagaattgagcaagttttcctgtttctctccctctgtggtatataaagaagtgggacctaatatatgtcaaatgtgaggcccctagacagatattttatctcttggaagctcagctttatttgtaaaaaggggatattgctctctgtcagaggagtggtaagcattagacacaatatatgtaaagcttccagaacagtgactggctcatggtaagttagccagaatgatagctcctattttattgttagataaaaagaatatgagaaaaaagttgaattacataataactaagaaacaggtcccacaaacatatatcaaatagtcttctaggaaggacatgcttttagtccgcttttaatcaacaataattttaaaaattagtccaaagcattgcatggaacataacatatctggatcacttactgaatatttctgcttttcatctgtttgagtgctgtcaggtagacagactcagaatttttgtttgaaaagaaatgtgtatgcagatatgagacaattattaattctgttgtattcaaatcaattactgaagaaatgaaagtaaaattacctaattaaattgaatcacacataaacctactctgtttgtgacgggtataattgaaatggtaattaagtggtagtaatgcatttcatttgaggatggcaattcagaagatgtgtttgctggcaggtcttggctgcttggtgtacctccctaggtgaccttgtccagagtgagtttttaggatggacttatttacttgtataactagatgtgttggtgaatgaattcctagtatagctctgaaattttattaatttccatacttatggtgctctatgtgttatattaaattcatgtctctgttgcatatctggaattctcagaaccacatatacataccccagcagtgttctttttttctctcttgtgtagaatcaaggagaaaacagaatattcagtttaaaaggatttcacattagagtacacataaacagacattttcctgagtgaagtttcaccttttttgggtcagagttactattgtcataggcacaggacagtcgatccctaattccaaatgatcttttttttttttttggatgcctttatcacctcctatcctgttttatcattgcttaatttcttgagtacatcttatctcctttgtgtgactggaaactccttgagggcagggaaaatgactttgtaatctctgcagcctgagggtagcagacagaatatgacttttagcacctaaccgactgggatagtatctttcctatgctgtgttttagttacctcatttgtaaaatagggaaagttagtgcttgtctcttggagttgttgtgagggttaataaacttagtaaagcttttatcacagggcctaatacattttaagaaataatttaagaaatattcatttatcttttccacagaagctaacacagtgccttatacatagtagtctctcaattaagaagatttgctgtttattttaaaatatattgtgagttaatatccctatgtgttggttatctgattgactgaatgcattagagacgtctctcagttattccagacattattattcagattaaccccacaggttacttcagttatgctatctgtgttgaggataccagagaccaaatcacccagctagtcttacccagaaggcagttttaaaataaatgctctaacgatggctctagcttagacaacttttaactcttttctcaacactcattcaaacaatactacattggactaaaagcttctcaagtacatgacttcaaaagcttcacatggcttcaaaatatacatcttttcagccagtgtcactctagaatttagagatggattttataaaacactttaagggatacctagagaatcttgaaatgtatatacaaacaggtcagaggtattattggaaaatcttaaagatacaatttaaaagttagtgttactattattattttgagtaatgaatatttctgatctttatgatccaaatctttcaagtcataaatcagtcatttagtagatatacatgaaaatgacatgtaattctaatgttgtttttaataaactttaatccagtagctaaatctcaaagatcatttagaatcctatgaatcaaatggctctcccttaaaactgttaagacagttctgttgattccagattgtgagccagacctccattttcttagaggagttgtgataattatcacatttgtctacaattattgtaacagtacttgggttcatatacacaatctttacaaaagatatttcccccagttttatcccaacatttacattccccctcagttgaattcttactagaaatatttgcttaaatatgtccaagcaatttgttacatgagcaatcattatctagttttacaagcatttgtttgtaatcattcctatagctgcaagaaataaggcagtatatttaatagcttgaagaataccatgtattctctttgtttacattgtaacagatcatcttcttaagaagtaatcttttattgtatctctttcactgttttctttaacgttacaaaaaaattttgtgttatttggaagctcatgaaatataatttgcttggcgtatggttctgtgaattaagcccataatatctaactggcatatataggaaagcaatgtacttaatcctaactgaactgaaaattcaagcttgtatccatatatttttagtagcaatttaatgataatcaagtcatatgcatttatgtgccaaaaagaactgtttgtggtaatcaatctgtaattttctgtttgacatttttttcctttgaattactgtaaaatactttcagctactagtaagattattttaaatcacaattaaaattgatttttccctgcttgggtgggtcttaaggttggtggggaacttcagtgctcccccaaatgcttccttttcaagtgtgaagtttacggatattttggatcttactgtgttctcaggatcatgtctctaggtaggcacagctttgatgactgatgtctattaattgtgtttgtcagtttataacaaagcatttattgctctaaaatgctctcatgctttggtattttgacttctttcctgcctgtgagagaccctagcttagtgattagtttttgtttctgagtttctgtttttaccaagtgtttttattttctagattactggctattgggataaaggaaatgatccagttagaggacatcagaaaactagaagcttttgatagaacaacaagatctagtgtccctatctaaagagaagaaatagagaaggtgtgccttcattagaagtgttacaatcaatagctgccaattacttagtgagcagaaaacatctggtactcaccttcatctatttgcagcctgtatatctttatgtacaggtcctcttctctctttctcagtttatttctttagatactgtagatgctttcatgactttcaactctgcatctagcactgtttctttcctcaaaggaaatcccacatccagtctatcagaaatccttggctctgcttctaaaatacatcctgaatttaaacaattctcaccaggcccgctactgtaactttagtctatcatcatttcctagtaccttaagcctaaaatattgcaacagtttaaccggtcttcctgcttccattcttgcttctctgtagtttgttttccacacaatagacagagcctgactttctaaaacccaaatcagatcataacaattcattgctttaaacacaaaagctttccactgaaactagaatacaactaaaattcctttccaaagtctgtaaggtcctaaaggctgtggccctgcctccatctctgacttcctcttctctattctttccctgttcactgaacttttaatacctcttccctttttcttttccgggacatggcaagttcgttcctgtctaaggacctctgtacttgctgtttctttggtttgggacacgttttcttccttgttttgcatgaaagcctccttcttttcttatttccatttaactgtcgcctccttggcgaggctttgcctgagcatcctagataaataagcccctctccaggcattctatgacattatcctgttttattttctttattatacttaatagtatctgaatttacttaatttgtgtatttatctcttctcccaacacacagttgaggaacatttggcttgttcattcatgtagtagggccaggaatgtaatagacaataaatgtgaactcacagatgaactgactccttgttctttcccttccataaatagaattctctgtgtgtgtctataaagcaaacaaagtgttttacactgtagtgttcattctaaaccctctattttagaaacctgtacattgaggcgaaagtcacatggggagagagtagtacaacaacgattaaaaaaccttatcttggccagatgtggtggctcacgcctgtaatcccagcactttgggaggccgagacgggtggatcacctgaggtcagaagttcgagaccagcctggccaaaatggtgaaactccgtctctactaaaaatacaaaaaaaaaaaaaaaaaaagaaaaaaaaattagtgtggtgtggtggcctgcacctgtaatcccagctactctggaggctgaggcaggagaatagtttgaacttggcgggtggaggttgcagtgagctgagatcatgccactgtactccatcctgggcgacagaaagtgagactctgtctgaaaaacaacaacaacaacaacaaaaccttatcttctgactcttggcttggtgttccttgctttacatgatacactcttatgttttggggtgaggccctgtagaagtagttaagagtactgattttcatattacatagacctggtttggagtcctggctgtgcaccctacttttgggttaagccgtaagggattactgacactccattgtttttcaacctaatagctgtgtgaccttaggaatgttccttagatttcctaaatttagttccttcagctgtaaaatggtataataataataatacttgccttaagttttgaagaaataaatgtaacaattgcatagagcacttagctcattttttggcacgtttgctgttgtgatttatagactgcaaatatttgcatatagctttttaatatttattagataaggcttctagggtttgaaaattaatgaataccaaccccattctaaagttaccacttgcattctaggaaatacatttgttttgccttgttttaagatttagaataccttttttattaaacagacaaacaaaacaagtttgcatcctcacatttcaccatttcacaaatctattgtggtatttcacaaatctattttattttataatggtaactttatttagctttttctatttgcttttatattatacttaatagtattttaattattatggttgatcatcatggtaatttaatagcctcttaggaagggaaatgctttataaaaacaatcaaatctaatttctttagttcctaggatattttggaaatacatgtattcttaagttagttaattgggtggaaaaattgcagttataattctttagaaaagaatgttgacatatctaaccaaaaattctgatgatagataggacttaaagagaaaatgtaaacaagtgtgttattgatttcaaattacttttatttgggttggattagctgtctttatgctaggactatttgtgtgtaatatagatcaaataaggtgttcagaatgggatgaactatctggaaggaagtggtgttatctatactactacagctggaaaatatgacaattacaaacttaattgatcaataccgtatcacatcattattcaatgattaaggactgctaggtgaaactgacataatggggttttctttttggaaaatagtatcttagttgtattggtattccactggatatttagtaaaagtgctatttactgagaacatccttaggatttagaaagagaactatgtagttttatagttacagagattctggtgcagatttgggaagaggtttgaaattagtatgtaaagtcagaacagcatgacctcaactaatgtactgtttgcccttgaccccttctccacaacctgccactaatgaaaggtctttgataagtgtaactgccttatacccattttatttacagttttcatagctaatgaataataagaaaattccaccaggacctgattgtttacctctctaatagcaatttacaaatggtgtatgctgtggctgttacaaaccgtgtcctgtaatagcatttgatgtaagtagctgctcaccattccatattgtggttggagctggagaaatagaaaattggtcatttcccggcagatagcagtaactttcaattcagtcagaatgctgtatgggctgtgataggtttataattattacccaaagattgatggttttttggtgtgtgtaaatttgtgcagcagtaatccattaagaaatcaataatcattccattctgatgtgtagttcctattcactgttataaatgtgtaccgtgagctgaaaccaatgtgttttgctttgttttttgaaattgtatttgacagtattggaaatgaggaaattattataatattttttcttcaatcaaatttctttttctttgtgttcccttgtaccatatgacgtacctattgcaagtctgcatttttctttgaaaaattttatttaaaactatttcaaatgtttctgtctcctttttaccatcatttactttgttgtttaataattacaaattatttataagcttaaagcatctcagtgtttctttctgtaatctggaggtgatttattaccaactctatatggtcaggaaagtaggaaattcttctcttgtaaaatacaattttaaccttaaaacgataatctcataaaaaacaactctaatgtttatttattaccggtacctcctaggatgccattgtgggaagctaggattaaggcagcattgaccctactctcaaaggagcttagattttagagaaagaaaggcagaaatcaacacacataacataagggtgtgaagaaatgggaaaagtggtaggggaaatgtcaaccctgaaaccatccattacgtaagttctgaactggaactttggtgttatggcatgatagtgctagggatgatggggtgtgggtgataaacttcatcccacaggggatgtggccagcattacaaaattctgacatagtgtggggctaaagagcagtctaaatagagattctaggtaaaaatgatataggaacatagtataaagttaaaacggtagagaaagatataacatgaaaagtaaaagctccaccactcaagtaccctagtcctcagtttcctgtgctaccaattccttaattatctttccataattttttggtatatactagtacaaatcatgtgtctacatattttgtttcctttcctattaatagtacaaatagggttgcatggtacatacttgccctatgactcaatttttcatttaggatttttttttaataccaacgttgttcttgggtgcatataatacctttatacactgatgatacatggtgatttaatttgctcctcattcactgttggacatttaggttgtttctatgtttttgttattatgtagacattgtttcagtgatattcttgttcattcatttaccttctttacatccttaggataacttagctgtgtatttgctatgtcaagaagtctgtgcaatgaatattttagtagataaagtgtggccaaattgctctttggaaagtataacaatttacactacaactagtaatatgtgagtgtctgttttctccccttgacaaaaatgcattttatccattttggttcatctgaatgggggaagatggtatctacgtatgtttgacatttcttaattacggttttttaaacataatttcaaatgtttgttggttggaaattctgtatttaatttttgttcctgaagaatatttctgcttcagtgtctgggagaaattataattaaaaactctattaggaactaggagaaagagagaaaaaagattttattcgtgattcatgatttgaggcatatttattaaaggataatggcagggaatggatgatttgatgttaagtagaaattttcaaatgttatacactctagaacagaagatgtgacttttatttctgtatctgctctaatttcactagttatcttggtaaatcacataagaaacccttccaaagtatttagcatagcagttcaatgaagttcaggggttaatgaaatctgaattcttatatcaagaaaccttgtcatccatatagccattctattaggggaaaagattgtgtatctaataagaagtagcaaacaaagaatacagaaagaaaaataaacctttacttaaaaattatacaattaattacatttaagttgctaggtgaggtataagggaatagataccttgtgcaggatgtaaggaataaggacctgatttctttttctttcctatttcaagactggtagagaactctgagtttgtcaattgattagcaagttgaattccttggaaacacataggcaaagcctacccttgagaaaagatgaaacctggtactttgttgttgttgtatacttattcaggaaataagttgtatacttattcaggtttagactcaccctgtactttctacacatgggaaactgaaatactcttgagagcagagaaagttcattgcatgacatatccacttgtacgtgaaaaattatgcatccaagtgtgtcgtgtagttttgtagctcctggtctgtcccgggaacgggatggtttgcagactgttagagagtatgctgaaggttacctaggacctgggtttgttctttgacctaaagataatccctaggcagaaggcttgtacctgtatccctttcccccttctgcacaatggcagtttcatgacagagctgattgatcttctttgctttttgcctgtaaaatcacatttaaaaatatcaggcttccaagttcttttgtgtggctgtgtgtgtgtgtgtgtgtgtgtgtgtgtgtgtgtgtgtgtgtgtgcgcgcgcgcgcgagcgcatgtgtgcgtgcacacaaggacatgcacccatgccattcatctcactgaaaataatccttgaatcagttacttaaaagtgaccccaaaggtcatttagaacaacttccttaacaaagcaagaatatccttgacagcatgcatgacaggtggtctctgggattttgcttgactgcttcaagtgctagaggaaaggaagtttactgttccattgctgatcagctctaattcttagaaagttcttccttatattgagccctcatctgcctgtctgaaatgtcactgcttttttttttcactaagactcaagctaaatatctcacaagttttagatgctttgttatgtattagtgcttgtagagcaggctttcatgtaggtttttagagtgttttgcattggcccttgtatttagaatactatcatcatttcttctgaggaatgatgctctaggtgtagtgcttaacatatatattatgtctttttccacctttgtaccaacagctgcaagtaaagcatgttaagtatggtaaataacaaaaccaaaccaaaccaaaccctgaatttattttcaataacttgtatcttattgttacttttaagcactttactcttttaatttatttatttattttattattatactttaagttctagggtacatgtgcacaacaagcaggtttgttacatatgtttacatgtgccatgttggtgtgctgcacctattaacttgtcatttacattaggtatatccttttaagtcttttattcgacaattcaaataacttatggttaaaataaaattttgtacaaaaactatgcctattttggaaacagaaatccattgcttatgtttccatttacatatacaattttgactttgtgcatagaattttgagcagatactataaaacctgatgctttgaggcttaaaagtaggacataaagtgaagaaggctatagggagatgttacaaaactcacatgaaggaagtatgatcatctttcaggattttactttgcttaggttgtggaaattcatcacggttttccagctgacatttcttaagaaagattcctaggtgaaaaagataatatggagtctactgaaagtggttgtaggcatccacatttcttcctctgaggatattagcaacacttgaattagcttatgacttcttatttctcccttgcctgagtggcagttttactgtgcctttattggatttactgttgtaattggatatggaattgtgccgggaagcatatatttcaatatgtgcaccttagcaatctaaatcgttaggatggtgactcactcacatttaacagggaaattagctggcttcgtctttgtgtgaacatttgaggaggagctgaccctagctgcagaaatatcacgtgttccaggtcacctgtggcaaaatctagccatgtgaaggattggagtttcttttgattatctaggctagattttgtcatccacctctttactttagtttggagaattatttaagtaggagaatcactggctgagaaatgattggatataaatttaagagctatgttagcccatttaattatgtcactgcagatttggtaagagtgtttcagcaaggtcacgtagtacttttctggtctgccatcatggcaagagacattatgaaattcttaggaaagaataatccttaaaaccaatttatttttaaaatagttatgtcatagggtctttttctcaaacttgcttgatcgtaagaatcatctaagatacttgaaaaaaataaacagtcccagacctcaactcaagtatactgaatcaaacaaagtgttcaagggaggaggagcctgcgactctaattctgataatcaggcaagtttaggaaatactgtcagatagtatatgtgcagggacttgggaaagaaaatagtggttgctccaaggagctaagatattacagcattttaccatcaatcactaaaatagtctctgcttttcagaagatggtagaagaacgtgactgaactgcatctttagggttgggtggtaggcagggagagttgtagctcttctcaagaaaaaactaaaaatgtaagcatatatgcataattttattattgtggtttgccctctctctctgtctctctgtctgtcttttcttttcctctacctgcctttgataatttttcctttgcttggctttctaggtctttttgattgagatgttttataaaatcatgtgaatattttcacactgtattttattacactctctattatttatttctgcacttctctctcagttgtattccttcagcctgttgacacaaaatagacacatgttcctgtttcagccagggagtttgtgcatctgttgacacttcagaaataatcagtttagatttcaacagctgattagtgtgctgttctaaccaaactgagaaggaactcttcagaatggaaacagatattattctatttagttttttgtacaaatatgtaataatggccattttaaaccaatgctgtggttataaaaggcctttgctgaagttttgtttttctttattgtacctcaaagaggctatcaaaatgtttagtgaccagtattccacaagttgtaatatgccaggggtaatcacaaacatttcataatggtccttgtatttatagcaactcaatgaatgttagaaagaatattggtagaattccaggaatatcatacatgatctgctaacagtttcagaactccagcttccacattgaattactactgaatgtaagaaatatagctaatggtatcagtgtagcacccaagtactgatttgcctaagataggaagccatatctccatgagctggagccaaaaggaaagaagagctcaacattttaaatgcgcttgtacaaatacttacctggttgaccttatatttctccaacagtctgaagaaatagatcagaaataggatcagggagcataatagaatcagtagaaatattatataatagaaacggaatcagaaagcataaaactagtttctagaaaagatcctataggataactattatgcatcttgatcagtcagcaagtatctatttagtactttatgaaaaatattgtgtataggacagagaagaagaatgcattttttcctttaaagagaatcagatttcacagttacatcatacataaataaaaaaattaaatagcagtttaatattttagatgggagtttgagacattaggcaaacatagtaaaattattttcatataattaaagtacagcagcttgggcaacatggcaaaaccctgtctctacaaaaaatacaaaaaattagctgggcgttgtggcacgtacccgtagtcccagctacttgaggggctgaggtgagaggatcccttgaacccaggaggttgaggctgcagtgagccaagatcttgcaactgcactccagcctgggttactacgagactgtctcaaaaataaataaatatataaagtgcaggataaagtgatttcttaggactaattgtaggtcatctgccttccagttagagttatagaattaatcattgcctttctgtagttttgtcacctacttctattacaaaaatttgtttgccattcttttttctgaatgactccccttacctgaggaatgcagtctaataagctctttagcattttatactacagcctttactaaacagcccaatctatctttttgtcttcatctcctgaaattccttttcacatatactgtgcttcagccacagatacttgccatgtcttgaatataacatattctttcaaattgccttttctttgcatgaatccttctcctttccttggatttctgtactttttctcaaccaggaaaactctcaatccttttcaaaggtccagtgtaactgcttat

SEQ ID NO: 613 - protein, 212 aa, Homo sapiens
MNSFSTSAFGPVAFSLGLLLVLPAAFPAPVPPGEDSKDVAAPHRQPLTSSERIDKQIRYILDGISALRKETCNKSNMCESSKEALAENNLNLPKMAEKDGCFQSGFNEETCLVKIITGLLEFEVYLEYLQNRFESSEEQARAVQMSTKVLIQFLQKKAKNLDAITTPDPTTNASLLTKLQAQNQWLQDMTTHLILRSFKEFLQSSLRALRQM

SEQ ID NO: 614 - DNA, 639 bp, Homo sapiens
  source 1..639: mol_type = genomic DNA
atgaactccttctccacaagcgccttcggtccagttgccttctccctggggctgctcctggtgttgcctgctgccttccctgccccagtacccccaggagaagattccaaagatgtagccgccccacacagacagccactcacctcttcagaacgaattgacaaacaaattcggtacatcctcgacggcatctcagccctgagaaaggagacatgtaacaagagtaacatgtgtgaaagcagcaaagaggcactggcagaaaacaacctgaaccttccaaagatggctgaaaaagatggatgcttccaatctggattcaatgaggagacttgcctggtgaaaatcatcactggtcttttggagtttgaggtatacctagagtacctccagaacagatttgagagtagtgaggaacaagccagagctgtgcagatgagtacaaaagtcctgatccagttcctgcagaaaaaggcaaagaatctagatgcaataaccacccctgacccaaccacaaatgccagcctgctgacgaagctgcaggcacagaaccagtggctgcaggacatgacaactcatctcattctgcgcagctttaaggagttcctgcagtccagcctgagggctcttcggcaaatgtag

SEQ ID NO: 615 - DNA, 7319 bp, Homo sapiens
  source 1..7319: mol_type = genomic DNA
aaatacaggcaattaggtgctacctctgggaaaaggggccaggagaggaaggagacacttttccctgcatgccctgatgtcctatttgaacattttatcatgaacacgaacttcctatttaaaaaacactttttattgaaaagataaatctgtgtgttgtattgtgtcactcagttcaagtacttgaaatttattgaattgtattttctaaaaaatagatagttgagtaaaagcaagctcacattacatagacggatcacagtgcacggctgcggagctgggagcagtggcttcgtttcatgcaggaaagagaacttggttcaggagtgtctacgttgcttaagacaggagagcactaaaaatgaaaccatccagccatcctcccccattttcattttcacaccaaagaatcccaccgcggcagaggaccaccgtctctgtttagacaatcggtgaagaatggatgacctcactttccccaacaggcgggtcctgaaatgttatgcacgaaacaaaacttgagtaaatgcccaacagaggtcactgttttatcgatcttgaagagatctcttcttagcaaagcaaagaaaccgattgtgaaggtaacaccatgtttggtaaataagtgttttggtgttgtgcaagggtctggtttcagcctgaagccatctcagagctgtctgggtctctggagactggagggacaacctagtctagagcccatttgcatgagaccaaggatcctcctgcaagagacaccatcctgagggaagagggcttctgaaccagcttgacccaataagaaattcttgggtgccgacgcggaagcagattcagagcctagagccgtgcctgcgtccgtagtttccttctagcttcttttgatttcaaatcaagacttacagggagagggagcgataaacacaaactctgcaagatgccacaaggtcctcctttgacatccccaacaaagaggtgagtagtattctccccctttctgccctgaaccaagtgggcttcagtaatttcagggctccaggagacctggggcccatgcaggtgccccagtgaaacagtggtgaagagactcagtggcaatggggagagcactggcagcacaaggcaaacctctggcacagagagcaaagtcctcactgggaggattcccaaggggtcacttgggagagggcagggcagcagccaacctcctctaagtgggctgaagcaggtgaagaaagtggcagaagccacgcggtggcaaaaaggagtcacacactccacctggagacgccttgaagtaactgcacgaaatttgaggatggccaggcagttctacaacagccgctcacagggagagccagaacacagaagaactcagatgactggtagtattaccttcttcataatcccaggcttggggggctgcgatggagtcagaggaaactcagttcagaacatctttggtttttacaaatacaaattaactggaacgctaaattctagcctgttaatctggtcactgaaaaaaaattttttttttttcaaaaaacatagctttagcttattttttttctctttgtaaaacttcgtgcatgacttcagctttactctttgtcaagacatgccaaagtgctgagtcactaataaaagaaaaaaagaaagtaaaggaagagtggttctgcttcttagcgctagcctcaatgacgacctaagctgcacttttccccctagttgtgtcttgccatgctaaaggacgtcacattgcacaatcttaataaggtttccaatcagccccacccgctctggccccaccctcaccctccaacaaagatttatcaaatgtgggattttcccatgagtctcaatattagagtctcaacccccaataaatataggactggagatgtctgaggctcattctgccctcgagcccaccgggaacgaaagagaagctctatctcccctccaggagcccagctatgaactccttctccacaagtaagtgcaggaaatccttagccctggaactgccagcggcggtcgagccctgtgtgagggaggggtgtgtggcccagggagggctggcgggcggccagcagcagaggcaggctcccagctgtgctgtcagctcacccctgcgctcgctcccctccggcacaggcgccttcggtccagttgccttctccctggggctgctcctggtgttgcctgctgccttccctgccccagtacccccaggagaagattccaaagatgtagccgccccacacagacagccactcacctcttcagaacgaattgacaaacaaattcggtacatcctcgacggcatctcagccctgagaaaggaggtgggtaggcttggcgatggggttgaagggcccggtgcgcatgcgttccccttgcccctgcgtgtggccgggggctgcctgcattaggaggtctttgctgggttctagagcactgtagatttgaggccaacggggccgactagactgacttctgtatttatcctttgctggtgtcaggaagttcctttcctttctggaaaatgcagaatgggtctgaaatccatgcccacctttggcatgagctgagggttattgcttctcagggcttccttttccctttccaaaaaattaggtctgtgaagctcctttttgtcccccgggctttggaaggactagaaaagtgccacctgaaaggcatgttcagcttctcagagcagttgcagtactttttggttatgtaaactcaatggctaggattcctcaaagccattccagctaagattcatacctcagagcccaccaaagtggcaaatcataaataggttaaagcatctccccactttcaatgcaaggtattttggtcctgtttggtagaaagaaaagaacacaggaggggagattgggagcccacactcgaattctggttctgccaaaccagccttgtgatcttgggtaaattccctaccacctctggactccatcagtaaaattgggcgtggactaggtgatctcatagatccttcctgctggaacattctatggcttgaattatattctcctaattattgtcaaaattgctgttattaagtatctactgtgtgccaggcactttaaataaatattgtgtctaatcttcaaaacaaatttgcaaggaaggtttttggagataaggaaactgagactcaggattaagtaacacacctaaagtcacaggtgagcttggaactgaacccaagtgtgcccccactccactggaatttgcttgccaggatgccaatgagttgtagcttcatttttcttagagactttcctggctgtggttgaacaatgaaaaggccctctagtggtgtttgttttagggacacttaggtgataacaattctggtattctttcccagacatgtaacaagagtaacatgtgtgaaagcagcaaagaggcactggcagaaaacaacctgaaccttccaaagatggctgaaaaagatggatgcttccaatctggattcaatgaggtaccaacttgtcgcactcacttttcactattccttaggcaaaacttctccctcttgcatgcagtgcctgtatacatatagatccaggcagcaacaaaaagtgggtaaatgtaaagaatgttatgtaaatttcatgaggaggccaacttcaagcttttttaaaggcagtttattcttggacaggtatggccagagatggtgccactgtggtgagattttaacaactgtcaaatgtttaaaactcccacaggtttaattagttcatcctgggaaaggtactctcagggccttttccctctctggctgcccctggcagggtccaggtctgccctccctccctgcccagctcattctccacagtgagataacctgcactgtcttctgattattttataaaaggaggttccagcccagcattaacaagggcaagagtgcaggaagaacatcaagggggacaatcagagaaggatccccattgccacattctagcatctgttgggctttggataaaactaattacatggggcctctgattgtccagttatttaaaatggtgctgtccaatgtcccaaaacatgctgcctaagaggtacttgaagttctctagaggagcagagggaaaagatgtcgaactgtggcaattttaacttttcaaattgattctatctcctggcgataaccaattttcccaccatctttcctcttaggagacttgcctggtgaaaatcatcactggtcttttggagtttgaggtatacctagagtacctccagaacagatttgagagtagtgaggaacaagccagagctgtgcagatgagtacaaaagtcctgatccagttcctgcagaaaaaggtgggtgtgtcctcattccctcaacttggtgtgggggaagacaggctcaaagacagtgtcctggacaactcagggatgcaatgccacttccaaaagagaaggctacacgtaaacaaaagagtctgagaaatagtttctgattgttattgttaaatctttttttgtttgtttggttggttggctctcttctgcaaaggacatcaataactgtattttaaactatatattaactgaggtggattttaacatcaatttttaatagtgcaagagatttaaaaccaaaggcgggggggcgggcagaaaaaagtgcatccaactccagccagtgatccacagaaacaaagaccaaggagcacaaaatgattttaagattttagtcattgccaagtgacattcttctcactgtggttgtttcaattctttttcctaccttttaccagagagttagttcagagaaatggtcagagactcaagggtggaaagaggtaccaaaggctttggccaccagtagctggctattcagacagcagggagtagacttgctggctagcatgtggaggagccaaagctcaataagaaggggcctagaatgaaacccttggtgctgatcctgcctctgccatttctacttaagccagggtttctcatatgttaacatgcatgggaattccctgggcatcttcttgtggtgtggagtctgacttagcaagcctcgggtgggtttgagggtcaaatttctaccaggcttatatccctggtgatgctgcagaattccaggaccacacttggaggtttaaggccttccacaagttacttatcccatatggtgggtctatggaaaggtgtttcccagtcctctttacaccaccggatcagtggtctttcaacagatcctaaagggatggtgagagggaaactggagaaaagtatcagatttagaggccactgaagaacccatattaaaatgcctttaagtatgggctcttcattcatatactaaatatgaactatgtgccaggcattatttcatatgacagaatacaaacaaataagatagtgatgctggtcaggcttggtggctcatgcctgtattccctaaactttgggagcctaaggtgagaactccttgaactcctaaggccaggagttcaagaccagcctggataacatagcaagaccccatctctacaaaaaaccaaaaccaaacaaacaaaaatgatagtggtgcttccctcaggatgcttgtggtctaatgggagacagaacagcaaagggatgattagaagttggttgctgtgagccaggcacagtgctgatataatcccagcgctatgggaggctgaggtgggtggatcatttgaggccaggagtttaagaccagcctggtcaacatggtaaaaccccatctctacttaaaaatacaaaaaagttagccaggcatggtggcatacacctgtaacccagctactcaggaggctgaggcacatgaatcacttgaacccaggaggcagaggttgctgtgcaccactgcactccagcctgggtgacagaacgagaccttgactcaaaaaaaaaaaaaagaagtttgttgctatggaagggtcctactcagagcaggcaccccagttaatctcattcaccccacatttcacatttgaacatcatcccatagcccagagcatccctccactgcaaaggatttattcaacatttaaacaatcctttttactttcattttccttcaggcaaagaatctagatgcaataaccacccctgacccaaccacaaatgccagcctgctgacgaagctgcaggcacagaaccagtggctgcaggacatgacaactcatctcattctgcgcagctttaaggagttcctgcagtccagcctgagggctcttcggcaaatgtagcatgggcacctcagattgttgttgttaatgggcattccttcttctggtcagaaacctgtccactgggcacagaacttatgttgttctctatggagaactaaaagtatgagcgttaggacactattttaattatttttaatttattaatatttaaatatgtgaagctgagttaatttatgtaagtcatatttatatttttaagaagtaccacttgaaacattttatgtattagttttgaaataataatggaaagtggctatgcagtttgaatatcctttgtttcagagccagatcatttcttggaaagtgtaggcttacctcaaataaatggctaacttatacatatttttaaagaaatatttatattgtatttatataatgtataaatggtttttataccaataaatggcattttaaaaaattcagcaactttgagtgtgtcacgtgaagcttaatataaacaagtttcttgtcactgccaccaccacgaccaaaaaaagctaatcaatcactatatataatacatatatatactatatataataaatatatatactatatataatacatatatacactatatataatacatatatactatatatacacatatatactatatatacacatatatattatgaatgtatatatatagtatatatagtatatatactatgtatgtatatatatagtatatatagtatatatactatgtatgtgtatatatagtatatatagtatatatagtatatatactatgtatgtatatatatagtatatatagtatatatactgtgtatgtatatatatagtatatatatactatatatgcatacatagtatatatgcatatatactatatatactatatatttatatatactatatactatatatactatatactgtatatatactatatatgtatgtatacgatatatatatatactatatatgtacacacacacatatatatatacatataagcacctactacatgccaggcatcattaaatgtgttgcatccat

SEQ ID NO: 616 - protein, 144 aa, Homo sapiens [sequence omitted]

SEQ ID NO: 617 - DNA, 435 bp, Homo sapiens
  source 1..435: mol_type = genomic DNA
atgcaagacccatatgtaaaagaagcagaaaaccttaagaaatattttaatgcaggtcattcagatgtagcggataatggaactcttttcttaggcattttgaagaattggaaagaggagagtgacagaaaaataatgcagagccaaattgtctccttttacttcaaactttttaaaaactttaaagatgaccagagcatccaaaagagtgtggagaccatcaaggaagacatgaatgtcaagtttttcaatagcaacaaaaagaaacgagatgacttcgaaaagctgactaattattcggtaactgacttgaatgtccaacgcaaagcaatacatgaactcatccaagtgatggctgaactgtcgccagcagctaaaacagggaagcgaaaaaggagtcagatgctgtttcgaggtcgaagagcatcccagtaa

SEQ ID NO: 618 - DNA, 6173 bp, Homo sapiens
  source 1..6173: mol_type = genomic DNA
tagatcatttaaatttacctgtgtggcttgtattgtatttctactgggcagtgctgatctagagcaatttgaaacttgtggtagatattttactaaccaactctgatgaaggacttcctcaccaaattgttcttttaaccgcattctttccttgctttctggtcatttgcaagaaaaattttaaaaggctgcccctttgtaaaggtttgagaggccctagaatttcgtttttcacttgttcccaaccacaagcaaatgatcaatgtgctttgtgaatgaagagtcaacattttaccagggcgaagtggggaggtacaaaaaaatttccagtccttgaatggtgtgaagtaaaagtgccttcaaagaatcccaccagaatggcacaggtgggcataatgggtctgtctcatcgtcaaaggacccaaggagtctaaaggaaactctaactacaacacccaaatgccacaaaaccttagttattaatacaaactatcatccctgcctatctgtcaccatctcatcttaaaaaacttgtgaaaatacgtaatcctcaggagacttcaattaggtataaataccagcagccagaggaggtgcagcacattgttctgatcatctgaagatcagctattagaagagaaagatcagttaagtcctttggacctgatcagcttgatacaagaactactgatttcaacttctttggcttaattctctcggaaacgatgaaatatacaagttatatcttggcttttcagctctgcatcgttttgggttctcttggctgttactgccaggacccatatgtaaaagaagcagaaaaccttaagaaatattttgtaagtatgactttttaatagtacttgtttgtggttgaaaatgactgaatatcgacttgctgtagcatctctgataggctgtcatctcttgtaggcagtcattttgagatttggtgttattttgttaattattgactagatgagttccttgactaaataatctagatattgttttaaccttctgctcagtttgtatagagacttaaaagggatttatgaattttccaaaagatgggcataatatgggtatgaagcataatgatgttaataattttgtggtgggaactcattcagttgtgatagtcaaggagtatgcagattgaaaaaaatgattggttattagtttttgacttctcagactctaaggtcaagattagcattaaaaaggtaataggaaatgtttacaaattaaagtcaaaaaggtccttaaagctttggcttaaaaaaataactgataggtgattttctccaaaaagtgatttcaacattctgcttctctatctatattacttgtgaagtattccggaacttcgttgctcactgggattttggaagaattatgattctggctaaggaatgtttaaaaattttaagtgaattttttgagtttcttttaaaattttattgatggttaatgaaaagtttttacattttaaatatttcattatttgtttaaaacttagctgttataattatagctgtcataataatattcagacattcacaattgattttattcttacaacacaaaatcaaatcacacacacacacacacacacacacacactcgcacatgtttggaactatcttttaaagctcgtataataataccctacaggaaggcacagtagatgtaatagaaacctgtaccattggggggcagtattttatagtggggtggctttgctgttttttgtttttgtattttttagcctagcttgaaaatactttctttagcttactatagtttttgggacctttggagtatcagctttgttgagctcatttgtgacattgcaatttaatggttatattgggaaataaaaaagctaaaagaacataatagtctttgtctatatctcacataagccttttgggaatacttattgttagaactaagcagaagagttgaaaaggaaatcagtgaatattgtcacatctgagttcaatgaaacttgaaatatatttttaaggcaatttatgggctaattgtaaaccaattttttctttttttttttttagaatgcaggtcattcagatgtagcggataatggaactcttttcttaggcattttgaagaattggaaagaggtaagctgaatattcccatttggctaattttcctgttgcttgctttctgatggataaattcacatcatcctctgtttgtgctctttccttccaaggagagtgacagaaaaataatgcagagccaaattgtctccttttacttcaaactttttaaaaactttaaagatgaccagagcatccaaaagagtgtggagaccatcaaggaagacatgaatgtcaagtttttcaatagcaacaaaaagaaacgagatgacttcgaaaagctgactaattattcggtgaggctatttaaattctttctttggtttcattgccgagggtcttgcaaagcatttattctccagaaagtagacattagctatttaacagttgctaaagctatgaactcaactcatggctgaaactctaccttactatttccattcgtgtttgggtgactttgcaaagccagtaagagaatcgctgaagtatgtaatgtagagaaatgctggcattgtaactattgcgtaaagacaggtgagttgacaaatccagtgaagaggaagtaggtgaggaagaagcggggagtactgagaagcagttctctcattgtcccttgctcatatgatggaaattctcttactttgaatgagaggctgtctgtcttaatggaaagagcagtgggaggagctgagaagatgtgtgttctcctcccaactcagccaccaaggaactgtgatgaatcacatggctggctggggctcagtttcctcatcttaaaaggaaactgttaggctcactgtataagtttgatgaccttctttgctccaaaactctacaatgcaaagaatagaaaatgagaatgagatagaagaaagctacagtctttgaataggtaccagggacaccccactgcaagtctctagccaacctatcagattgtactgcccaattagaagcaagaatggttgctgtttgtttgtttttagggaaaaatagatagaatttataccttatgaaaagattgttctatcaactctctatcaactttcagaatatctcagctggagaactccttagactcctaagtcttacctcatgaacttgtatctttaagttatggcttctataaacagaaagataacgttgaggcataaagacaaatcatgtttttcaaaatgttttctagaagacaaaggcctctagattcctttggggttgactttgatataaatgggctcaaatgagagggaccagggtcttcaagctagcatttgtgttcttaggatatgtgctcagctttcactattgctgggcctgcctctcactcctctcatgtaagcccccagaaacagaaaggagagacatggcaacaggtctcctttggttataaactagacactcagcacttgtttctaatccagtggtgcccctggcttactgttcagtcctggataagtctcttagtttcttggtgatgatttgaacattggaaagtaaaatctgtcacttgcaaacacacagcttgtcgaaaattttttctactctgcaggaactgggccttaaaaaaatgaaaaaaaatctgtggtttcttccttctggaagctacaaacctcctgtttcttgatgggcaatcttgagtgagctctattaattattattctctttggctcagttgctaagctattttatgcatgttatgccctttgacaattagtctttagctgtaatcccccagccatcctcagaaatgtggtgagtagccatagtgttcccaagattagaaaaaatgtaatggcagagccaagaggaaggtaaatggtccacattttatgaagcatcatctaaatggccctattggttagagtgaggagatgcaagtagttcaatttgcttgcctagaaggcagggtactggaaaagttgttgcaattcttaattttaaactttatatatcagtaagccatatataaatatgattgggggtgtttattttaaaatctattatggaaattgagagactgacctaatctgggagaaattaaaaattacagttttcactcgttttggatttggtgttttctagggtacctaacctagatcagtggttctcaaacttaggtggatgtcagaatcacctggggagcttagtgaatgcacagggcacagtccttccacttcatgcacctggatctctgaggtctttgacaggtttccggattaatctgctatgcacaacagtgagaatcattgacctatagttactcatttgatgcatacaggaaagactgaagtataaagtgatataattggtagattgatgatagagaggtcatagaaacagtctcatcctcctttagatgagaaaatagaagttcagagaggttaagtagctggctcaaggtcagaattattgcatgcatgagattcaaacccacctttttatgctgactccacaaccaggagtcttttcactatataatttcaagaattctatagaagtagatttaaagatatgtgatggactccaccacattatagcacaactagaaatgtaattgtaatttttagcttcaactgctgaagaagtaaatattgtatattaaggtaatacggtccattttttaaaggaatacttttattttcactgaccatcatgacattagcagaatatcctgatggcttatatgcctgaaattaattttgctcttttctttcccgataggtaactgacttgaatgtccaacgcaaagcaatacatgaactcatccaagtgatggctgaactgtcgccagcagctaaaacagggaagcgaaaaaggagtcagatgctgtttcgaggtcgaagagcatcccagtaatggttgtcctgcctgcaatatttgaattttaaatctaaatctatttattaatatttaacattatttatatggggaatatatttttagactcatcaatcaaataagtatttataatagcaacttttgtgtaatgaaaatgaatatctattaatatatgtattatttataattcctatatcctgtgactgtctcacttaatcctttgttttctgactaattaggcaaggctatgtgattacaaggctttatctcaggggccaactaggcagccaacctaagcaagatcccatgggttgtgtgtttatttcacttgatgatacaatgaacacttataagtgaagtgatactatccagttactgccggtttgaaaatatgcctgcaatctgagccagtgctttaatggcatgtcagacagaacttgaatgtgtcaggtgaccctgatgaaaacatagcatctcaggagatttcatgcctggtgcttccaaatattgttgacaactgtgactgtacccaaatggaaagtaactcatttgttaaaattatcaatatctaatatatatgaataaagtgtaagttcacaactacttatgctgtgttggactttttctaagtgagacctggagtgaaagaactacctattaatgaattagtagggaggggagtcttcttagctgtggaaattttagagttgcatttggttccattaaatgtggtatttctttccactagcattttgttggctttcgcttttccagttagcagctctttgaattatctttctaagatacagatttaattatgtcactattcaattcagaggttctgctatggaatgtagtttaaactgcttagcttggcacacagagatttatttctagccccttctccaccttcctatttcctccttcatttcagaatcttcctctccctcatccaatgctggcaaacaccagtgggggtggagtagtgggtgtaagctctagggagaaggcttggattggaatccaagttattccattacaagtagtgtgacctttaatacattatgtatattgtctaagtttcagctttattgtctgaaaaagaaaaataattgtgtgttcctcataatattgtggtacgaattgattctttcactcaagaaatatttactggagtacctactacatgcctggtgctgttgt

SEQ ID NO: 619 - protein, 153 aa, Homo sapiens
MYRMQLLSCIALSLALVTNSAPTSSSTKKTQLQLEHLLLDLQMILNGINNYKNPKLTRMLTFKFYMPKKATELKHLQCLEEELKPLEEVLNLAQSKNFHLRPRDLISNINVIVLELKGSETTFMCEYADETATIVEFLNRWITFCQSIISTLT

SEQ ID NO: 620 - DNA, 462 bp, Homo sapiens
  source 1..462: mol_type = genomic DNA
atgtacaggatgcaactcctgtcttgcattgcactaagtcttgcacttgtcacaaacagtgcacctacttcaagttctacaaagaaaacacagctacaactggagcatttactgctggatttacagatgattttgaatggaattaataattacaagaatcccaaactcaccaggatgctcacatttaagttttacatgcccaagaaggccacagaactgaaacatcttcagtgtctagaagaagaactcaaacctctggaggaagtgctaaatttagctcaaagcaaaaactttcacttaagacccagggacttaatcagcaatatcaacgtaatagttctggaactaaagggatctgaaacaacattcatgtgtgaatatgctgatgagacagcaaccattgtagaatttctgaacagatggattaccttttgtcaaagcatcatctcaacactaacttga

SEQ ID NO: 621 - DNA, 6456 bp, Homo sapiens
  source 1..6456: mol_type = genomic DNA
gttacattcatagtgtcccaggtgatttagaggataaataaaaatccattaaagaggtaaagacataaaaacgagaaacatggactggtttacacataacacatacaaagtctattataaaactagcatcagtatccttgaatgcaaacctttttctgagtatttaacaatcgcaccctttaaaaaatgtacaatagacattaagagacttaaacagatatataatcattttaaattaaaatagcgttaaacagtacctcaagctcaataagcattttaagtattctaatcttagtatttctctagctgacatgtaagaagcaatctatcttattgtatgcaattagctcattgtgtggataaaaaggtaaaaccattctgaaacaggaaaccaatacacttcctgttttatcaacaaatctaaacatttattcttttcatctgtttactcttgctcttgtccaccacaatatgctattcacatgttcagtgtagttttatgacaaagaaaattttctgagttacttttgtatccccacccccttaaagaaaggaggaaaaactgtttcatacagaaggcgttaattgcatgaattagagctatcacctaagtgtgggctaatgtaacaaagagggatttcacctacatccattcagtcagtctttgggggtttaaagaaattccaaagagtcatcagaagaggaaaaatgaaggtaatgttttttcagacaggtaaagtctttgaaaatatgtgtaatatgtaaaacattttgacacccccataatatttttccagaattaacagtataaattgcatctcttgttcaagagttccctatcactctctttaatcactactcacagtaacctcaactcctgccacaatgtacaggatgcaactcctgtcttgcattgcactaagtcttgcacttgtcacaaacagtgcacctacttcaagttctacaaagaaaacacagctacaactggagcatttactgctggatttacagatgattttgaatggaattaatgtaagtatatttcctttcttactaaaattattacatttagtaatctagctggagatcatttcttaataacaatgcattatactttcttagaattacaagaatcccaaactcaccaggatgctcacatttaagttttacatgcccaagaaggtaagtacaatattttatgttcaatttctgttttaataaaattcaaagtaatatgaaaatttgcacagatgggactaatagcagctcatctgaggtaaagagtaactttaatttgtttttttgaaaacccaagtttgataatgaagcctctattaaaacagttttacctatatttttaatatatatttgtgtgttggtgggggtgggaagaaaacataaaaataatattctcactttatcgataagacaattctaaacaaaaatgttcatttatggtttcatttaaaaatgtaaaactctaaaatatttgattatgtcattttagtatgtaaaataccaaaatctatttccaaggagcccacttttaaaaatcttttcttgttttaggaaaggtttctaagtgagaggcagcataacactaatagcacagagtctggggccagatatctgaagtgaaatctcagctctgccatgtcctagctttcatgatctttggcaaattacctactctgtttgtgattcagtttcatgtctacttaaatgaataactgtatatacttaatatggctttgtgagaattagtaagtaaatgtaaagcactcagaaccgtgtctggcataaggtaaataccatacaagcattagctattattagtagtattaaagataaaattttcactgagaaatacaaagtaaaattttggactttatctttttaccaatagaacttgagatttataatgctatatgacttattttccaagattaaaagcttcattaggttgtttttggattcagatagagcataagcataatcatccaagctcctaggctacattaggtgtgtaaagctacctagtagctgtgccagttaagagagaatgaacaaaatctggtgccagaaagagcttgtgccagggtgaatccaagcccagaaaataataggatttaaggggacacagatgcaatcccattgactcaaattctattaattcaagagaaatctgcttctaactacccttctgaaagatgtaaaggagacagcttacagatgttactctagtttaatcagagccacataatgcaactccagcaacataaagatactagatgctgttttctgaagaaaatttctccacattgttcatgccaaaaacttaaacccgaatttgtagaatttgtagtggtgaattgaaagcgcaatagatggacatatcaggggattggtattgtcttgacctacctttcccactaaagagtgttagaaagatgagattatgtgcataatttagggggtggtagaattcatggaaatctaagtttgaaaccaaaagtaatgataaactctattcatttgttcatttaaccctcattgcacatttacaaaagattttagaaactaataaaaatatttgattccaaggatgctatgttaatgctataatgagaaagaaatgaaatctaattctggctctacctacttatgtggtcaaattctgagatttagtgtgcttatttataaagtggagatgatacttcactgcctacttcaaaagatgactgtgagaagtaaatgggcctattttggagaaaattcttttaaattgtaatataccatagaaatatgaaatattatatataatatagaatcaagaggcctgtccaaaagtcctcccaaagtattataattttttatttcactgggacaaacatttttaaaatgcatcttaatgtagtgattgtagaaaagtaaaaatttaagacatatttaaaaatgtgtcttgctcaaggctatattgagagccactactacatgattattgttacctagtgtaaaatgttgggattgtgatagatggcatccaagagttccttctctctcaacattctgtgattcttaactcttagactatcaaatattataatcatagaatgtgatttttatgcttccacattctaactcatctggttctaatgattttctatgcagattggaaaagtaatcagcctacatctgtaataggcatttagatgcagaaagtctaacattttgcaaagccaaattaagctaaaaccagtgagtcaactatcacttaacgctagtcataggtacttgagccctagtttttccagttttataatgtaaactctactggtccatctttacagtgacattgagaacagagagaatggtaaaaactacatactgctactccaaataaaataaattggaaattaatttctgattctgacctctatgtaaactgagctgatgataattattattctaggccacagaactgaaacatcttcagtgtctagaagaagaactcaaacctctggaggaagtgctaaatttagctcaaagcaaaaactttcacttaagacccagggacttaatcagcaatatcaacgtaatagttctggaactaaaggtaaggcattactttatttgctctcctggaaataaaaaaaaaaaagtagggggaaaagtaccacattttaaagtgacataacatttttggtatttgtaaagtacccatgcatgtaattagcctacattttaagtacactgtgaacatgaatcatttctaatgttaaatgattaactggggagtataagctactgagtttgcacctaccatctactaatggacaagcctcatcccaaactccatcacctttcatattaacacaaaactgggagtgagagaaggtactgagttgagtttcacagaaagcaggcagattttactatatatttttcaattccttcagatcatttactggaatagccaatactgattacctgaaaggcttttcaaatggtgtttccttatcatttgatggaaggactacccataagagatttgtcttaaaaaaaaaaactggagccattaaaatggccagtggactaaacaaacaacaatctttttagaggcaatccccactttcagaatcttaagtatttttaaatgcacaggaagcataaaatatgcaagggactcaggtgatgtaaaagagattcacttttgtctttttatatcccgtctcctaaggtataaaattcatgagttaataggtatcctaaataagcagcataagtatagtagtaaaagacattcctaaaagtaactccagttgtgtccaaatgaatcacttattagtggactgtttcagttgaattaaaaaaatacattgagatcaatgtcatctagacattgacagattcagttccttatctatggcaagagttttactctaaaataattaacatcagaaaactcattcttaactcttgatacaaatttaagacaaaaccatgcaaaaatctgaaaactgtgtttcaaaagccaaacactttttaaaataaaaaaatcccaagatatgacaatatttaaacaattatgcttaagaggatacagaacactgcaacagttttttaaaagagaatacttatttaaagggaacactctatctcacctgcttttgttcccagggtaggaatcacttcaaatttgaaaagctctcttttaaatctcactatatatcaaaatatttcctccttagcttatcaactagaggaagcgtttaaatagctcctttcagcagagaagcctaatttctaaaaagccagtccacagaacaaaatttctaatgtttaaacttttaaaagttggcaaattcacctgcattgatactatgatggggtagggataggtgtaagtatttatgaagatgttcttcacacaaatttatcccaaacagaagcatgtcctagcttactctagtgtagttctgttctgctttggggaaaatataaggagattcacttaagtagaaaaataggagactctaatcaagatttagaaaagaagaaagtataatgtgcatatcaattcatacatttaacttacacaaatataggtgtacattcagaggaaaagcgatcaagtttatttcacatccagcatttaatatttgtctagatctatttttatttaaatctttatttgcacccaatttagggaaaaaatttttgtgttcattgactgaattaacaaatgaggaaaatctcagcttctgtgttactatcatttggtatcataacaaaatatgtaattttggcattcattttgatcatttcaagaaaatgtgaataattaatatgtttggtaagcttgaaaataaaggcaacaggcctataagacttcaattgggaataactgtatataaggtaaactactctgtactttaaaaaattaacatttttcttttatagggatctgaaacaacattcatgtgtgaatatgctgatgagacagcaaccattgtagaatttctgaacagatggattaccttttgtcaaagcatcatctcaacactgacttgataattaagtgcttcccacttaaaacatatcaggccttctatttatttaaatatttaaattttatatttattgttgaatgtatggtttgctacctattgtaactattattcttaatcttaaaactataaatatggatcttttatgattctttttgtaagccctaggggctctaaaatggtttcacttatttatcccaaaatatttattattatgttgaatgttaaatatagtatctatgtagattggttagtaaaactatttaataaatttgataaatataaacaagcctggatatttgttattttggaaacagcacagagtaagcatttaaatatttcttagttacttgtgtgaactgtaggatggttaaaatgcttacaaaagtcactctttctctgaagaaatatgtagaacagagatgtagacttctcaaaagcccttgctttgtcctttcaagggctgatcagacccttagttctggcatctcttagcagattatattttccttcttcttaaaatgccaaacacaaacactcttgaaactcttcatagatttggtgtggctatgaattctccaatatcttacaccctgcccagtgctgtgaggaggctcacctgtatggcctatatcaaaggtcttccctgccctttggctttccattgggtcctgccactggggagtgctggtaggaactatgaggaacataagagattcccttgactccctccttgtggagtagacccaggatggctgtgtctctcaagcaaggaacccagattacctcaaggtggcactctgggtactttttccttctgagtgattctggtaatcttcccttgtccctttaagcctagggagggtggtacttttgctgttagcaa

SEQ ID NO: 622 - protein, 3256 aa, Homo sapiens
MWPTRRLVTIKRSGVDGPHFPLSLSTCLFGRGIECDIRIQLPVVSKQHCKIEIHEQEAILHNFSSTNPTQVNGSVIDEPVRLKHGDVITIIDRSFRYENESLQNGRKSTEFPRKIREQEPARRVSRSSFSSDPDEKAQDSKAYSKITEGKVSGNPQVHIKNVKEDSTADDSKDSVAQGTTNVHSSEHAGRNGRNAADPISGDFKEISSVKLVSRYGELKSVPTTQCLDNSKKNESPFWKLYESVKKELDVKSQKENVLQYCRKSGLQTDYATEKESADGLQGETQLLVSRKSRPKSGGSGHAVAEPASPEQELDQNKGKGRDVESVQTPSKAVGASFPLYEPAKMKTPVQYSQQQNSPQKHKNKDLYTTGRRESVNLGKSEGFKAGDKTLTPRKLSTRNRTPAKVEDAADSATKPENLSSKTRGSIPTDVEVLPTETEIHNEPFLTLWLTQVERKIQKDSLSKPEKLGTTAGQMCSGLPGLSSVDINNFGDSINESEGIPLKRRRVSFGGHLRPELFDENLPPNTPLKRGEAPTKRKSLVMHTPPVLKKIIKEQPQPSGKQESGSEIHVEVKAQSLVISPPAPSPRKTPVASDQRRRSCKTAPASSSKSQTEVPKRGGRKSGNLPSKRVSISRSQHDILQMICSKRRSGASEANLIVAKSWADVVKLGAKQTQTKVIKHGPQRSMNKRQRRPATPKKPVGEVHSQFSTGHANSPCTIIIGKAHTEKVHVPARPYRVLNNFISNQKMDFKEDLSGIAEMFKTPVKEQPQLTSTCHIAISNSENLLGKQFQGTDSGEEPLLPTSESFGGNVFFSAQNAAKQPSDKCSASPPLRRQCIRENGNVAKTPRNTYKMTSLETKTSDTETEPSKTVSTANRSGRSTEFRNIQKLPVESKSEETNTEIVECILKRGQKATLLQQRREGEMKEIERPFETYKENIELKENDEKMKAMKRSRTWGQKCAPMSDLTDLKSLPDTELMKDTARGQNLLQTQDHAKAPKSEKGKITKMPCQSLQPEPINTPTHTKQQLKASLGKVGVKEELLAVGKFTRTSGETTHTHREPAGDGKSIRTFKESPKQILDPAARVTGMKKWPRTPKEEAQSLEDLAGFKELFQTPGPSEESMTDEKTTKIACKSPPPESVDTPTSTKQWPKRSLRKADVEEEFLALRKLTPSAGKAMLTPKPAGGDEKDIKAFMGTPVQKLDLAGTLPGSKRQLQTPKEKAQALEDLAGFKELFQTPGHTEELVAAGKTTKIPCDSPQSDPVDTPTSTKQRPKRSIRKADVEGELLACRNLMPSAGKAMHTPKPSVGEEKDIIIFVGTPVQKLDLTENLTGSKRRPQTPKEEAQALEDLTGFKELFQTPGHTEEAVAAGKTTKMPCESSPPESADTPTSTRRQPKTPLEKRDVQKELSALKKLTQTSGETTHTDKVPGGEDKSINAFRETAKQKLDPAASVTGSKRHPKTKEKAQPLEDLAGLKELFQTPVCTDKPTTHEKTTKIACRSQPDPVDTPTSSKPQSKRSLRKVDVEEEFFALRKRTPSAGKAMHTPKPAVSGEKNIYAFMGTPVQKLDLTENLTGSKRRLQTPKEKAQALEDLAGFKELFQTRGHTEESMTNDKTAKVACKSSQPDPDKNPASSKRRLKTSLGKVGVKEELLAVGKLTQTSGETTHTHTEPTGDGKSMKAFMESPKQILDSAASLTGSKRQLRTPKGKSEVPEDLAGFIELFQTPSHTKESMTNEKTTKVSYRASQPDLVDTPTSSKPQPKRSLRKADTEEEFLAFRKQTPSAGKAMHTPKPAVGEEKDINTFLGTPVQKLDQPGNLPGSNRRLQTRKEKAQALEELTGFRELFQTPCTDNPTTDEKTTKKILCKSPQSDPADTPTNTKQRPKRSLKKADVEEEFLAFRKLTPSAGKAMHTPKAAVGEEKDINTFVGTPVEKLDLLGNLPGSKRRPQTPKEKAKALEDLAGFKELFQTPGHTEESMTDDKITEVSCKSPQPDPVKTPTSSKQRLKISLGKVGVKEEVLPVGKLTQTSGKTTQTHRETAGDGKSIKAFKESAKQMLDPANYGTGMERWPRTPKEEAQSLEDLAGFKELFQTPDHTEESTTDDKTTKIACKSPPPESMDTPTSTRRRPKTPLGKRDIVEELSALKQLTQTTHTDKVPGDEDKGINVFRETAKQKLDPAASVTGSKRQPRTPKGKAQPLEDLAGLKELFQTPICTDKPTTHEKTTKIACRSPQPDPVGTPTIFKPQSKRSLRKADVEEESLALRKRTPSVGKAMDTPKPAGGDEKDMKAFMGTPVQKLDLPGNLPGSKRWPQTPKEKAQALEDLAGFKELFQTPGTDKPTTDEKTTKIACKSPQPDPVDTPASTKQRPKRNLRKADVEEEFLALRKRTPSAGKAMDTPKPAVSDEKNINTFVETPVQKLDLLGNLPGSKRQPQTPKEKAEALEDLVGFKELFQTPGHTEESMTDDKITEVSCKSPQPESFKTSRSSKQRLKIPLVKVDMKEEPLAVSKLTRTSGETTQTHTEPTGDSKSIKAFKESPKQILDPAASVTGSRRQLRTRKEKARALEDLVDFKELFSAPGHTEESMTIDKNTKIPCKSPPPELTDTATSTKRCPKTRPRKEVKEELSAVERLTQTSGQSTHTHKEPASGDEGIKVLKQRAKKKPNPVEEEPSRRRPRAPKEKAQPLEDLAGFTELSETSGHTQESLTAGKATKIPCESPPLEVVDTTASTKRHLRTRVQKVQVKEEPSAVKFTQTSGETTDADKEPAGEDKGIKALKESAKQTPAPAASVTGSRRRPRAPRESAQAIEDLAGFKDPAAGHTEESMTDDKTTKIPCKSSPELEDTATSSKRRPRTRAQKVEVKEELLAVGKLTQTSGETTHTDKEPVGEGKGTKAFKQPAKRKLDAEDVIGSRRQPRAPKEKAQPLEDLASFQELSQTPGHTEELANGAADSFTSAPKQTPDSGKPLKISRRVLRAPKVEPVGDVVSTRDPVKSQSKSNTSLPPLPFKRGGGKDGSVTGTKRLRCMPAPEEIVEELPASKKQRVAPRARGKSSEPVVIMKRSLRTSAKRIEPAEELNSNDMKTNKEEHKLQDSVPENKGISLRSRRQNKTEAEQQITEVFVLAERIEINRNEKKPMKTSPEMDIQNPDDGARKPIPRDKVTENKRCLRSARQNESSQPKVAEESGGQKSAKVLMQNQKGKGEAGNSDSMCLRSRKTKSQPAASTLESKSVQRVTRSVKRCAENPKKAEDNVCVKKIRTRSHRDSEDI

SEQ ID NO: 623 - DNA, 9771 bp, Homo sapiens
  source 1..9771: mol_type = genomic DNA
atgtggcccacgagacgcctggttactatcaaaaggagcggggtcgacggtccccactttcccctgagcctcagcacctgcttgtttggaaggggtattgaatgtgacatccgtatccagcttcctgttgtgtcaaaacaacattgcaaaattgaaatccatgagcaggaggcaatattacataatttcagttccacaaatccaacacaagtaaatgggtctgttattgatgagcctgtacggctaaaacatggagatgtaataactattattgatcgttccttcaggtatgaaaatgaaagtcttcagaatggaaggaagtcaactgaatttccaagaaaaatacgtgaacaggagccagcacgtcgtgtctcaagatctagcttctcttctgaccctgatgagaaagctcaagattccaaggcctattcaaaaatcactgaaggaaaagtttcaggaaatcctcaggtacatatcaagaatgtcaaagaagacagtaccgcagatgactcaaaagacagtgttgctcagggaacaactaatgttcattcctcagaacatgctggacgtaatggcagaaatgcagctgatcccatttctggggattttaaagaaatttccagcgttaaattagtgagccgttatggagaattgaagtctgttcccactacacaatgtcttgacaatagcaaaaaaaatgaatctcccttttggaagctttatgagtcagtgaagaaagagttggatgtaaaatcacaaaaagaaaatgtcctacagtattgtagaaaatctggattacaaactgattacgcaacagagaaagaaagtgctgatggtttacagggggagacccaactgttggtctcgcgtaagtcaagaccaaaatctggtgggagcggccacgctgtggcagagcctgcttcacctgaacaagagcttgaccagaacaaggggaagggaagagacgtggagtctgttcagactcccagcaaggctgtgggcgccagctttcctctctatgagccggctaaaatgaagacccctgtacaatattcacagcaacaaaattctccacaaaaacataagaacaaagacctgtatactactggtagaagagaatctgtgaatctgggtaaaagtgaaggcttcaaggctggtgataaaactcttactcccaggaagctttcaactagaaatcgaacaccagctaaagttgaagatgcagctgactctgccactaagccagaaaatctctcttccaaaaccagaggaagtattcctacagatgtggaagttctgcctacggaaactgaaattcacaatgagccatttttaactctgtggctcactcaagttgagaggaagatccaaaaggattccctcagcaagcctgagaaattgggcactacagctggacagatgtgctctgggttacctggtcttagttcagttgatatcaacaactttggtgattccattaatgagagtgagggaatacctttgaaaagaaggcgtgtgtcctttggtgggcacctaagacctgaactatttgatgaaaacttgcctcctaatacgcctctcaaaaggggagaagccccaaccaaaagaaagtctctggtaatgcacactccacctgtcctgaagaaaatcatcaaggaacagcctcaaccatcaggaaaacaagagtcaggttcagaaatccatgtggaagtgaaggcacaaagcttggttataagccctccagctcctagtcctaggaaaactccagttgccagtgatcaacgccgtaggtcctgcaaaacagcccctgcttccagcagcaaatctcagacagaggttcctaagagaggagggagaaagagtggcaacctgccttcaaagagagtgtctatcagccgaagtcaacatgatattttacagatgatatgttccaaaagaagaagtggtgcttcggaagcaaatctgattgttgcaaaatcatgggcagatgtagtaaaacttggtgcaaaacaaacacaaactaaagtcataaaacatggtcctcaaaggtcaatgaacaaaaggcaaagaagacctgctactccaaagaagcctgtgggcgaagttcacagtcaatttagtacaggccacgcaaactctccttgtaccataataatagggaaagctcatactgaaaaagtacatgtgcctgctcgaccctacagagtgctcaacaacttcatttccaaccaaaaaatggactttaaggaagatctttcaggaatagctgaaatgttcaagaccccagtgaaggagcaaccgcagttgacaagcacatgtcacatcgctatttcaaattcagagaatttgcttggaaaacagtttcaaggaactgattcaggagaagaacctctgctccccacctcagagagttttggaggaaatgtgttcttcagtgcacagaatgcagcaaaacagccatctgataaatgctctgcaagccctcccttaagacggcagtgtattagagaaaatggaaacgtagcaaaaacgcccaggaacacctacaaaatgacttctctggagacaaaaacttcagatactgagacagagccttcaaaaacagtatccactgcaaacaggtcaggaaggtctacagagttcaggaatatacagaagctacctgtggaaagtaagagtgaagaaacaaatacagaaattgttgagtgcatcctaaaaagaggtcagaaggcaacactactacaacaaaggagagaaggagagatgaaggaaatagaaagaccttttgagacatataaggaaaatattgaattaaaagaaaacgatgaaaagatgaaagcaatgaagagatcaagaacttgggggcagaaatgtgcaccaatgtctgacctgacagacctcaagagcttgcctgatacagaactcatgaaagacacggcacgtggccagaatctcctccaaacccaagatcatgccaaggcaccaaagagtgagaaaggcaaaatcactaaaatgccctgccagtcattacaaccagaaccaataaacaccccaacacacacaaaacaacagttgaaggcatccctggggaaagtaggtgtgaaagaagagctcctagcagtcggcaagttcacacggacgtcaggggagaccacgcacacgcacagagagccagcaggagatggcaagagcatcagaacgtttaaggagtctccaaagcagatcctggacccagcagcccgtgtaactggaatgaagaagtggccaagaacgcctaaggaagaggcccagtcactagaagacctggctggcttcaaagagctcttccagacaccaggtccctctgaggaatcaatgactgatgagaaaactaccaaaatagcctgcaaatctccaccaccagaatcagtggacactccaacaagcacaaagcaatggcctaagagaagtctcaggaaagcagatgtagaggaagaattcttagcactcaggaaactaacaccatcagcagggaaagccatgcttacgcccaaaccagcaggaggtgatgagaaagacattaaagcatttatgggaactccagtgcagaaactggacctggcaggaactttacctggcagcaaaagacagctacagactcctaaggaaaaggcccaggctctagaagacctggctggctttaaagagctcttccagactcctggtcacaccgaggaattagtggctgctggtaaaaccactaaaataccctgcgactctccacagtcagacccagtggacaccccaacaagcacaaagcaacgacccaagagaagtatcaggaaagcagatgtagagggagaactcttagcgtgcaggaatctaatgccatcagcaggcaaagccatgcacacgcctaaaccatcagtaggtgaagagaaagacatcatcatatttgtgggaactccagtgcagaaactggacctgacagagaacttaaccggcagcaagagacggccacaaactcctaaggaagaggcccaggctctggaagacctgactggctttaaagagctcttccagacccctggtcatactgaagaagcagtggctgctggcaaaactactaaaatgccctgcgaatcttctccaccagaatcagcagacaccccaacaagcacaagaaggcagcccaagacacctttggagaaaagggacgtacagaaggagctctcagccctgaagaagctcacacagacatcaggggaaaccacacacacagataaagtaccaggaggtgaggataaaagcatcaacgcgtttagggaaactgcaaaacagaaactggacccagcagcaagtgtaactggtagcaagaggcacccaaaaactaaggaaaaggcccaacccctagaagacctggctggcttgaaagagctcttccagacaccagtatgcactgacaagcccacgactcacgagaaaactaccaaaatagcctgcagatcacaaccagacccagtggacacaccaacaagctccaagccacagtccaagagaagtctcaggaaagtggacgtagaagaagaattcttcgcactcaggaaacgaacaccatcagcaggcaaagccatgcacacacccaaaccagcagtaagtggtgagaaaaacatctacgcatttatgggaactccagtgcagaaactggacctgacagagaacttaactggcagcaagagacggctacaaactcctaaggaaaaggcccaggctctagaagacctggctggctttaaagagctcttccagacacgaggtcacactgaggaatcaatgactaacgataaaactgccaaagtagcctgcaaatcttcacaaccagacccagacaaaaacccagcaagctccaagcgacggctcaagacatccctggggaaagtgggcgtgaaagaagagctcctagcagttggcaagctcacacagacatcaggagagactacacacacacacacagagccaacaggagatggtaagagcatgaaagcatttatggagtctccaaagcagatcttagactcagcagcaagtctaactggcagcaagaggcagctgagaactcctaagggaaagtctgaagtccctgaagacctggccggcttcatcgagctcttccagacaccaagtcacactaaggaatcaatgactaacgaaaaaactaccaaagtatcctacagagcttcacagccagacctagtggacaccccaacaagctccaagccacagcccaagagaagtctcaggaaagcagacactgaagaagaatttttagcatttaggaaacaaacgccatcagcaggcaaagccatgcacacacccaaaccagcagtaggtgaagagaaagacatcaacacgtttttgggaactccagtgcagaaactggaccagccaggaaatttacctggcagcaatagacggctacaaactcgtaaggaaaaggcccaggctctagaagaactgactggcttcagagagcttttccagacaccatgcactgataaccccacgactgatgagaaaactaccaaaaaaatactctgcaaatctccgcaatcagacccagcggacaccccaacaaacacaaagcaacggcccaagagaagcctcaagaaagcagacgtagaggaagaatttttagcattcaggaaactaacaccatcagcaggcaaagccatgcacacgcctaaagcagcagtaggtgaagagaaagacatcaacacatttgtggggactccagtggagaaactggacctgctaggaaatttacctggcagcaagagacggccacaaactcctaaagaaaaggccaaggctctagaagatctggctggcttcaaagagctcttccagacaccaggtcacactgaggaatcaatgaccgatgacaaaatcacagaagtatcctgcaaatctccacaaccagacccagtcaaaaccccaacaagctccaagcaacgactcaagatatccttggggaaagtaggtgtgaaagaagaggtcctaccagtcggcaagctcacacagacgtcagggaagaccacacagacacacagagagacagcaggagatggaaagagcatcaaagcgtttaaggaatctgcaaagcagatgctggacccagcaaactatggaactgggatggagaggtggccaagaacacctaaggaagaggcccaatcactagaagacctggccggcttcaaagagctcttccagacaccagaccacactgaggaatcaacaactgatgacaaaactaccaaaatagcctgcaaatctccaccaccagaatcaatggacactccaacaagcacaaggaggcggcccaaaacacctttggggaaaagggatatagtggaagagctctcagccctgaagcagctcacacagaccacacacacagacaaagtaccaggagatgaggataaaggcatcaacgtgttcagggaaactgcaaaacagaaactggacccagcagcaagtgtaactggtagcaagaggcagccaagaactcctaagggaaaagcccaacccctagaagacttggctggcttgaaagagctcttccagacaccaatatgcactgacaagcccacgactcatgagaaaactaccaaaatagcctgcagatctccacaaccagacccagtgggtaccccaacaatcttcaagccacagtccaagagaagtctcaggaaagcagacgtagaggaagaatccttagcactcaggaaacgaacaccatcagtagggaaagctatggacacacccaaaccagcaggaggtgatgagaaagacatgaaagcatttatgggaactccagtgcagaaattggacctgccaggaaatttacctggcagcaaaagatggccacaaactcctaaggaaaaggcccaggctctagaagacctggctggcttcaaagagctcttccagacaccaggcactgacaagcccacgactgatgagaaaactaccaaaatagcctgcaaatctccacaaccagacccagtggacaccccagcaagcacaaagcaacggcccaagagaaacctcaggaaagcagacgtagaggaagaatttttagcactcaggaaacgaacaccatcagcaggcaaagccatggacacaccaaaaccagcagtaagtgatgagaaaaatatcaacacatttgtggaaactccagtgcagaaactggacctgctaggaaatttacctggcagcaagagacagccacagactcctaaggaaaaggctgaggctctagaggacctggttggcttcaaagaactcttccagacaccaggtcacactgaggaatcaatgactgatgacaaaatcacagaagtatcctgtaaatctccacagccagagtcattcaaaacctcaagaagctccaagcaaaggctcaagatacccctggtgaaagtggacatgaaagaagagcccctagcagtcagcaagctcacacggacatcaggggagactacgcaaacacacacagagccaacaggagatagtaagagcatcaaagcgtttaaggagtctccaaagcagatcctggacccagcagcaagtgtaactggtagcaggaggcagctgagaactcgtaaggaaaaggcccgtgctctagaagacctggttgacttcaaagagctcttctcagcaccaggtcacactgaagagtcaatgactattgacaaaaacacaaaaattccctgcaaatctcccccaccagaactaacagacactgccacgagcacaaagagatgccccaagacacgtcccaggaaagaagtaaaagaggagctctcagcagttgagaggctcacgcaaacatcagggcaaagcacacacacacacaaagaaccagcaagcggtgatgagggcatcaaagtattgaagcaacgtgcaaagaagaaaccaaacccagtagaagaggaacccagcaggagaaggccaagagcacctaaggaaaaggcccaacccctggaagacctggccggcttcacagagctctctgaaacatcaggtcacactcaggaatcactgactgctggcaaagccactaaaataccctgcgaatctcccccactagaagtggtagacaccacagcaagcacaaagaggcatctcaggacacgtgtgcagaaggtacaagtaaaagaagagccttcagcagtcaagttcacacaaacatcaggggaaaccacggatgcagacaaagaaccagcaggtgaagataaaggcatcaaagcattgaaggaatctgcaaaacagacaccggctccagcagcaagtgtaactggcagcaggagacggccaagagcacccagggaaagtgcccaagccatagaagacctagctggcttcaaagacccagcagcaggtcacactgaagaatcaatgactgatgacaaaaccactaaaataccctgcaaatcatcaccagaactagaagacaccgcaacaagctcaaagagacggcccaggacacgtgcccagaaagtagaagtgaaggaggagctgttagcagttggcaagctcacacaaacctcaggggagaccacgcacaccgacaaagagccggtaggtgagggcaaaggcacgaaagcatttaagcaacctgcaaagcggaagctggacgcagaagatgtaattggcagcaggagacagccaagagcacctaaggaaaaggcccaacccctggaagatctggccagcttccaagagctctctcaaacaccaggccacactgaggaactggcaaatggtgctgctgatagctttacaagcgctccaaagcaaacacctgacagtggaaaacctctaaaaatatccagaagagttcttcgggcccctaaagtagaacccgtgggagacgtggtaagcaccagagaccctgtaaaatcacaaagcaaaagcaacacttccctgcccccactgcccttcaagaggggaggtggcaaagatggaagcgtcacgggaaccaagaggctgcgctgcatgccagcaccagaggaaattgtggaggagctgccagccagcaagaagcagagggttgctcccagggcaagaggcaaatcatccgaacccgtggtcatcatgaagagaagtttgaggacttctgcaaaaagaattgaacctgcggaagagctgaacagcaacgacatgaaaaccaacaaagaggaacacaaattacaagactcggtccctgaaaataagggaatatccctgcgctccagacgccaaaataagactgaggcagaacagcaaataactgaggtctttgtattagcagaaagaatagaaataaacagaaatgaaaagaagcccatgaagacctccccagagatggacattcagaatccagatgatggagcccggaaacccatacctagagacaaagtcactgagaacaaaaggtgcttgaggtctgctagacagaatgagagctcccagcctaaggtggcagaggagagcggagggcagaagagtgcgaaggttctcatgcagaatcagaaagggaaaggagaagcaggaaattcagactccatgtgcctgagatcaagaaagacaaaaagccagcctgcagcaagcactttggagagcaaatctgtgcagagagtaacgcggagtgtcaagaggtgtgcagaaaatccaaagaaggctgaggacaatgtgtgtgtcaagaaaataagaaccagaagtcatagggacagtgaagatatttga

SEQ ID NO: 624 - DNA, 30965 bp, Homo sapiens
  source 1..30965: mol_type = genomic DNA
tggcgcgatctcagctcactgcagcctcgaccgccccggctcaagcgatcctcccacctcagctgtcccagtagctagaactacaggggcgccaccacgcctggcgaattttttgtagagatgggttctctccaggtggcccaggctggttctgaactcccgggctcaagggatcttcctgcttcagcttcccaaagtgcggggattaccggcgtgagccaccgcgtcccgcctgtttttaatttttagcagttttaaatcttctggcaatgagtaatgttatagtgtcccagatgtttggtcctttaagaaaaggatagcaggacgggttatctcggtgggagcgtgttccacctctgccctccgccagccgccctcgccggggatgcacccaggtattttcctccggatgcgtgagtggctcgcccgcggacacgccagccccgccccgcgagcccggtttccccgccccctccccgcccacgccctgcgctcccttcctattggtcccatgccgcgctttcccgttcaatcgcagcgcttagcgccagaatttgaatcttcgttttcgtttgaattgggcgggcgcgccgggctggaagaaggaagtggagggctgacgctgcgggcgggcgggcgggcgggaggactcgactcggtgggagccgctagagccgggcgcccggggacgtagcctgtagggccaccgggtccccgtcagaggcggcggcgggagcagcggggactgcaggccggggtgcagcgaacgcgaccccgcgggctgcggcccggtgtgtgcggagcgtggcgggcgcagcttaccgggcggaggtgagcgcggcgccggctcctcctgcggcggactttgggtgcgacttgacgagcggtggttcgacaagtggccttgcgggccggatcgtcccaggtgagctgcggccgggactcctgggagctgtccggggtcgagggctgagccgcggggaccccccgagctctgcggggacgggcaggggacagacgcgcggcctgggcccgactcctcctgggctctggcgagggcgtctcggtggaagctcccaggaggcgcaggcgctggcgacaacaccccagctgccggactttggggcgccgggggctgcggtcggatcgtcctggggtccccgctagctagctgcggtgtgcgcttctgtggccggggataggtgaattgggcacggggcccttcttagctcctttgctatcagagtaactcgcacctcttttgcagtggaagagttgtaaatttgcttctggccttcccctacggattatacctggccttcccctacggattatactcaacttactgtttagaaaatgtggcccacgagacgcctggttactatcaaaaggagcggggtcgacggtccccactttcccctgagcctcagcacctgcttgtttggaaggtgagccccgcgggcgcgcgcggacgttttagctgagaaagaggaaaataccttagtcacagaataaagtccagaaacgcgctctaggattgggtcctgccgtcacttttccttggtgcttctcccattcgttactaagttgacatagttgtgtttttttgttttgtaagtataaatttgatgctagtttgtatgtttaagtggttttaaaaatcaagccaattaaaaaaatcgatttgctaatgttgcggtaaagaaagatgtagatgatcttcatatgtcactggctgcaggcaggcgtctgaagacactgtgcgcccccgggtgcctccacagtgggcatccctggccactggggacacagagaatgaaggaaggaagccatacacttgtctcttggctccttgtggcaataggaaaatgggacagaaagtcttcctgcctggaattcgagaacgtttcctcttatattgctgtcctgtttggtggtggtaataaccctgtccctgtataacaggtatagttgctgacagtgccccatcagcctctgacatgtgtcccactagaggcctgagaaggggggtcatttcccgtgtggtcatttcccagaccacacgggattcaggcctcaccctgtcctcccaaccccatcccggcctcaccctgtcctcccaaccccatcccctaccttgttcctcccgcctaaggcattccaagcctttgttcaccttggtacttcttacacacttggaagtttacaatgggaaagttctccccttcctcaagcttgtgtgatttccatcattcaggcatcaggtgaaatgtcacctctgaggaagccttgcatgaaaacttgtatttccaaccccacagcttcaggggtgagttgtgggtttgtctcccactaggctgagctccccaaaggcaaagactgtcttgttactaatcacgtgtgtagggccagggatggtgtctggcatagggggtgtgatcaatacctagcattctggcaagggtcagtagaaacatgggctggagccatggatttgcaatctcttgagaacagtggttctcacaggagggtcatctaaccttccaggattcatttgaatttccatgtcacaatataggacaggggcatgcgctgtcatcgcggaggagaggtcagggtgggcatcctaccaggctcagggcagcccccacaatacagaagcatctggcccaagatgtcaacagtgccaaagctcagaaacacccatctatagtcgtcctcctgccaaacaaattctcagttgtaagggatagtctttcctttgctctgatgtcctgttaccttaaaatcaaattattttattggggttaaggaagcttttcactttccatagatacctttctcttgaaaaggaaaaatataaacatttcatctccagtggcagtccttttgcttttttatacagtactccttgaatatatcttcatgcaagattttataatttagaaataattcctaagtgtttggtcacatgacctgggtaggaagagagattcttagactccaaaggttcagatggagaacagacaggccattgcatagtttattcaaatttttaagatcacaggctagaacaggaacactgaagactccaagaacctactaacaaactcttctgattattagtttgtataggtttaggaattgtctcttctgctactttgccatggtgttagctttctgtggaaaaacaagttgaatttagattttttttttgtgtcgcttgcaaattagtatttttattgtttagagacttgaatctgtcagtaaattcagtgtagttttaaaacaacaatgaaaagcttacccataatgagcatttactatgtgctaggcaaattagtgacatgtacaaccatttaattgaacatcacatgatgtaggttctaatgtaatttctttattgtatatgaagaaactgatgcacagaagtgctagcatcaaataagcacatttggggatgattaaacctctaaacatatttaacattacaaacaaacgtttttgaaaaagcacagagtattaaaaatagtcattatccaaaattgatgtaagtattcctttgtgtcttttaagtatagcttttcatataaaaggtaattcgatttgtgttctagtgttttcccttgtttttacatactctctgttttaaagatctaatagttacatgtttaatacttccaaaagttctttgcaaaatgcaagatcgtttacattgcccattttgtttgttactcctttatgtcatatttacagatcaaacattctagtcaaattgtgttttattttgggaaattgaggtaatcttttaaaaagttgcagcaaccaaaaaaaccttcttcttttgcatgaaggggtattgaatgtgacatccgtatccagcttcctgttgtgtcaaaacaacattgcaaaattgaaatccatgagcaggaggtgagtgggttttttgaagatctacttttaaagctttttagttcacttttaatctgttcattagttacatatttccccttcttttcacttgcaggcaatattacataatttcagttccacaaatccaacacaagtaaatgggtctgttattgatgagcctgtacggctaaaacatggagatgtaataactattattgatcgttccttcaggtaggtaaaagctgattggtctaacagtaaatgtcatcttctgattaaccataaactagtgtcaaagtcaactgtcattcttctttaatgttcatggatgtcaaagtatttcaggttttcattctcaacactaatcttaatttaaaaggatatggatctaggaagatgactaattgggacaaaatgtgatggaattcaaggatttgggtgcaaataattatgcagagggaggttgaccttgtcctaaaggagtttgttattttcttccaagtgttttgaaactgcatgagatttttctattcttttttattttaaagcaaaatatacacagagaaaaaggtacaaaacaagatggacaggtcaatttatcatgtgaacacccttttgatcaccacctattatggactgatttgtgctctcccgaaattcatattttgaattcctaacccctcgtaccttaggatgtaactgtatttggaaagagggcatttaaaaaggcaatgaaggctttttgagctattagtatgggccctaatctgatgattggtgtcattataagtggagattagggaacacgtgcacagaggaaagcccatgagaagaggcagcaagaaggcagccatcttcaagtcaaggagagaggcacagagaaatccaatccagctgacaccttgctcttggacttccagcctccagcactgagaagggcatgtctgtttttcaaggcattcagtctgtgggactttattatggtggccctagcagactaatacatcctcagctcatatagaacatttccagaagctttttaaaaatgctgttgtctaatcactacttcattccctcagcaagtaaaccaccgttttggcttttaggatatcataaacgtctcgagtttcactacctaagcatggatctctgaacacgatagttttgtctgttcttataaaagtccttaacagtgatacaagaatgtatacatttgtgcctggcttgtgcttttctgtgtgtgagattcatagcatgttggacatctctgtagtttgttccttctcatggcataagtatttcactgaaaaaaaaatgtttaatatatacaataatatacataactatacagaattcattcattcttgatggacatttgactaatgtctagtctttgaaatgtgtcaaggtttgctttatgagcagatatggctaattatcttactaatctgccttgtgtaattgaaaactgtattctacagtgtctcatatatatgtaatatataattattatatatatcacttatataatatataattataatatattatatataatcatatataattataatataatatataatattatatagtatatactatatgttatatagtaatatataatataataatatatattatatataccatatagtatatactgtatacagtatatactatatggtatatataatacatatacaatatatatacaatatatttatattatataatatataatatatacatatataatatgtaatatatatacacatatacagatacacacactcccgttagattcaaatctataatcttagtaaattttcccctactattattctaagagatatgttcaaatcacctactgaggattgattgattgatttgtttttatctctatcagtttttgctttgtatattttgaggctgtactatggtgtacaaacttagaatgatgtcttggtgcatggaactctgtcatttagagatgtcctctgtttttagtagtgctttcttttctgcttaatgtttcctttggatgatgagtatggttaaactaatttccttttgatgagtgcttgtgtagtataacttttccacccccttaattttaacttttcataattgttatggtttaagttgtctcttggaacctgttgtcaggtgacctcttgtgtttaactggaatatcttcttgctggattgatccttatataaaatgtcctttttctctatgaataacttttgtctgagatgattttgtctcatgttagtacagtactccagttcccctctgcttgctgtttgcatggtatatcttttcccatgcttttattttaaaagattgtgtctttgaatcaaaattgcgtctcttgtagacaacgtattagttgggtcatttaaaaatccattctgctaaatgaatctctgttattgtcttcatttgtattagctgttttttaatgcaccacttaaattccctagtcatttcttttactgtgcttctgggaagtttgccttcatttttaaagagtatttttattgaatacagacttctatgtaggaagtttttctttttttctttttctttttgtttgtttgtttgtttgtttttgagacagagtcttgctctgtcacccaggctggagtgcagtggtgtgatcttggctcactgcaacctccgcctcccgggttcaagtgattctcatgcctcagcctaccaagtagctgggattacaggcacgcgccacaacacccggctaatttttgcaatttttagtagagacggcgtttcaccatgatggccaggctggtcttgaactcttggtctcaagtgatccacctgcttcagcctcccaaaatgctgagattacaggcatgagccactgcgcccggcctataggtaggaagcttttgatgtttattggagggctgaactatttttcaaaacaagatattatccaaattgagataaattcagatgattaaagacatccaacaaagatttgaaagtgaatcttagaaagagagacttgattccaaactctctaccatgagaaataatatcagatgtgtgactgcttcagatcttacttaggttgcctataaattcaaatcaggtcatttcactgaggccaaaagttttcattatgcaaaataaaggattgcttctatgacttgatcactgaggtttgccaggacaattatgtatcttgctaaaggtgatcttcttaagatgtacctgtcttgttcagatacagactgaatgtgtgggaaactgaagtgatcatagtgttctaaaatataggtttgtagttaccctgtagtgtaagtgtagctttttatttaccctgaagtatgtaacttcacaacgtgagaaagattcagttacctacaggcttcctggctggccttccaagccatccgatgatttccatggacttaaactagaagaaacttgactttgctctcatgtgcattagcttatgtcatagaaggtgcttggtaatattgtcaaatcatacctgggctgttcgtcagtgatcagaagttaatctgggtccccagcctctgacagtggtatttcaaaacaaactcgatgcaactaatcctagtttttagtgtaaaagcacttttctaactctaaatttatttctttgtataaggtgatgtcttgaactaaacccaaagtttgttcgttgatccttggacattaagtggatatggagacttccgccccagggtataaatttttaatcaggatctttgtcgttctataaactgcaggtatgaaaatgaaagtcttcagaatggaaggaagtcaactgaatttccaagaaaaatacgtgaacaggtgatagaaaatatccaagtttgggctgattcgtttcgatgatatgaaatcatttatgtatgctttaatgatttcttacttgaaatcagttacaaagagggtggttactgttatagtaggaaaatgtaactaaagtataaaaacgagttgaacttagacgtattaaaataatctaaaatgatatttcctctttattgttcaaaatcagagcactaagttggtcttacacttttagccaaaaagtctattagagcatgttgcgagctttttgcaaacccatgattaggataaccccaacacgtagagctaacatttgggaattgcattatctggtggctcattttgtcgcccagtcattgtactcatccgtctttatgtgtctgaaataatcacattatgaaaatcatgagtgccaaagatgcttctctattttgatagatagacgacccatgaaacaggaaaagggatcctgtgctttgtcttgtgagagaatcctatagtttgagtgtatcagtgtggaacaggtattccaattgtacagcttatgaaaacataattgtcgacacgtgcttcgcaatttagatagtttgagtatatcagtgtggaagaggtattttagttgtacagcttattaaaacacagttgtcggcatgtgcttggaaatttagtgggatttaggcttaggatgagccctgagaattcatatttttcctacattttagagtgctcctaaagctagtttcagatgagctccttggaatatcttggcttaggagagttatcttaggtgcacctgaaattagcagtaggtactcttgaatttcaacatttctgcctttttttttttttttttttctgagacggagtctcactccgtcacccaggctggagtgcagtggtgcgatcttggctcactgcaacctccgcctcctgggttcaagcaattctcctgcctcagcctcccgagtagctgggactacaggtgcacaccaccatgcctggctaatttttgtatttttagtagagacagggtttcaccatattgaccaggctggtcttgaactcctaacctcgtgatccacccacctgggcctcccaaagtgctgggattacaggcttgagccaccatgcccagtccatttctgccatttaagtactgccttcttccctagaggagcagccttaatgttgaatctgatggtcatcagttcccgtgctggaagccagtttctgaggcatcccacactgtagccaccaggcaacttgctagtctatgggagtaaataaaccaaaaagccagttgaactgtgggttagatatgtgccactcagcagtctaggaactgtttgttctgttactggtctgtgatatagtgagtactgaaatggagtatgtagtaaatatgacagcaattcgacagcaattttgtggctattgaatgtaatcgtacaacaaaagtgagattatatactttacatattcataattttattagtggttcatttatattgtttagtcataagattcttgttccacttcagattggaaataaaaaaccatccctcacatagatagttttagaagcaaggtgttacgtatcaagaaacctaaaattgattaaggaagttagattctttgcctttgttaatattttttagatattttcttaataatccagatgataagcttttcttcctttggggcatcagacttttataaaagttatatatatatgttattctttagttcttccacccttccggaaataattccatatgaaggaaagttagggcgctgtctctggggagccaggtgggggcgctgcgcctgctcccaggctgtgaggttgcagaatctgtgaatataccatgtgtgcctgtaccatgaatttacctagggtgaatctaggctctcagatccaccctaagtatccaccagccaagagggcgcacatgccaagtggagcctcagttcatcgacaggtcctatggcccatttatgagaaaactgatgacgcagtcagtagttctgagctcgtggggggttacagatcttcagtataggtgatgtttaatattgactttggttcttccgcaataggatgttgggaaatatctttaaaggaagttataaaaacacaccgaggtttgattttagtaattttaagcctcgaatttgtttcctattaatcactcactattttttaatgagtcagctaataagtacttttatcctgaccactagctcccaactgacttgagctcatttctcaaacagtctttaaaagtcatatacgagtggtttggtaaagaaaacaattttttattgtttttatttttattttttgagacagagtctcgctttattgcccaggctagagtgcagtggtgcaatctctgctcactgcaacctctgcctcccgggttccagcaattctcctgcctcggccacctgagtagctgggactacaggcacctgccaccacatccagctaatgtttgtatttgcagtagagatgaggttacatcatgttggccaggctgttctcaaactcctgacctcaagtgatccgcccaccttggcctcccaaagtgctgggattacaggcatgagccatcatgcccagccagaaaacaataaataatattttcactgttgtgactgtcatcatttagaaagacctgcaaataactgttcttattttcccaacttacaggagccagcacgtcgtgtctcaagatctagcttctcttctgaccctggtgagtagtggttgggttttgttccagaatcctgaaagatcaggtctttgcgaagcatattggcaaagaaggggcaacaagaatgcaagtgctaaatgtctagcctgtcagaaatggaggaggtgtcatttaacatgtcaacgacagacagatgcctaactttcccttggtgactgatggtatgctatgcttaggagagactctagatatgagaaaattgcctgttcagctgtcaactcagttctcagtagttagatagcatgtgctatttcatactggttattggagctgatatgatttatatatttgtatcataatactagtatcataagacttgcaagttttaggcattaaataatttgtaggccaagtaaaagctagcttataagacaacctgaaacaattaaaatattgaattccacaaatgttaatcattgagaaaatgctgaacttctgtttcttatttcataattcattgccaagatgagaaagctcaagattccaaggcctattcaaaaatcactgaaggaaaagtttcaggaaatcctcaggtacatatcaagaatgtcaaagaagacagtaccgcagatgactcaaaagacagtgttgctcagggaacaactaatgttcattcctcagaacatgctggacgtaatggcagaaatgcagctgatcccatttctggggattttaaagaaatttccagcgttaaattagtgagccgttatggagaattgaagtctgttcccactacacaatgtcttgacaatagcaaaaaaaatgaatctcccttttggaagctttatgagtcagtgaagaaagagttggatgtaaaatcacaaaaagaaaatgtcctacagtattgtagaaaatctggattacaaactgattacgcaacagagaaagaaagtgctgatggtttacagggggagacccaactgttggtctcgcgtaagtcaagaccaaaatctggtgggagcggccacgctgtggcagagcctgcttcacctgaacaagagcttgaccagaacaaggggaagggaagagacgtggagtctgttcagactcccagcaaggctgtgggcgccagctttcctctctatgagccggctaaaatgaagacccctgtacaatattcacagcaacaaaattctccacaaaaacataagaacaaagacctgtatactactggtagaagagaatctgtgaatctgggtaaaagtgaaggcttcaaggctggtgataaaactcttactcccaggaagctttcaactagaaatcgaacaccagctaaagttgaagatgcagctgactctgccactaagccagaaaatctctcttccaaaaccagaggaagtattcctacagatgtggaagttctgcctacggaaactgaaattcacaatgagccatttttaactctgtggctcactcaagttgagaggaagatccaaaaggattccctcagcaagcctgagaaattgggcactacagctggacagatgtgctctgggttacctggtcttagttcagttgatatcaacaactttggtgattccattagtaagtttatttaattgtaaatttatttttctaaaagatgaacaccttctatgtagctgtgagaccttcattctttcagtagtgattagctttgtggaagagaatgtaagcacataaggcacagggataagacagacacgcacgctgttttcgctaatagatgaatactgaaggcctaggtaattgtaacaaggaatgacagaagagatggaagttgtcaggcaatcatgaagcaggggttattgaaggagatagggtggccccaaaaatatttgattctcctccatctatcacaaaatagaaaagagaataatcataattgcttttcacatggagtttaattctgaactacaatcaactgtatcatatgagtttggtcatgtggaataaatcactggtaatcattaaacatagcggtagttctcaggtgttgatactctgttttcagagtgtcctacaaacaatttgctgtaaacactggactgtacccatgagtccatatgccacatgaacacttgatccttggtgcaatagcagtgcccgtggctaggttgtctttttagagctatgtcacacatgaggaaacgcacaacccaaggccagtcaggaagtggcagaggtaggacctttatagcaggtgtggtagctcctcgggagcttcctacactcctagggactggctattagaagaaaagttgtctgggccacagacgcagtattcgtactccaggctgtgtttctgcaggtggcctatagcggtggggcatgaggctgtcgataaaataaggtttgtaacatcagtctcagtattccaccaagcttcctagtggggaagcatcacttaggcaagggatttacattaactggtggctcaggaaaatgtgtggccgggactgggctcctgtgaattgactcagaaccacctggaggagtttttacagctcatgcattctggtcactgggtggctcaggctgagacccaagtgcatgtctttagagagttctctggctgtcgtccccctactctaaggtgaaatctgctgctgcagactcctcctttctatgtccacacataatgtttcaatgttttaaagaaagcctctgtactgtccagtggcaacttgacgtcttagtggccactcccgcaatcctttaggaactcttagtagcttagcttcaccaggattgcaagaatagaggcgtgctgtaggtactgtgtttcgatgacttttcacttggtttgtctttaatgctaacgtgaaataaatcactagtcttggtatgttttttcattgctctttccacatttgtatccgttactttagatgagagtgagggaatacctttgaaaagaaggcgtgtgtcctttggtgggcacctaagacctgaactatttgatgaaaacttgcctcctaatacgcctctcaaaaggggagaagccccaaccaaaagaaagtctctggtaatgcacactccacctgtcctgaagaaaatcatcaaggtgagttgaacaagcagcatcccattcacgcccagtggctcacacaccgggtacctattcctttccaaatactgacacaagtagaattatgatgaagacctttatttatttattaaagaaacaagtttttaaaaagacgaatgaaagctcattgatgtgggcaccagcaaaggagcccctgggtccctgaccgtggtgctgatgcgaccgagtcgggggagtccttgatgttgtccttttcgtgcagaagttcccagacacccacgcttacagcactgcgtaatcacctgcaggcaccgtcagaatagccaattacaaagattctggatacattaccacgtcgacccataaggattgttttattttcttttagagttacaaggctatagttaaggcatttacctggtgtgaaggaaaatcaatggcacatcttccttttacaccttcagctctttagaatatttgcttgcctgttcctttgctgtgttgtccttcctgggtttcacacctctgggaagtcatggccctatagctcataacctttgtaatagggcctgggcggtctttctttccttctcttcccagcaggagtggaaagtgatgtctggctccctttccattttacactggctcccaggggcaagcagtcctccctccatgtggactgccgggggctgggtgctcacagctggtatttactgggactgagatcagaccctgcttgtctttcactgatcaggatgttccttccacctttttacctgaaatgacctcacttcagacttggcttgcttctctttccttttccttaaatgactgagacagtctcacctctaccatagtcttcaaagacagtggcttaagcatttgatgcttcaagatttaaacagctgaaattcttaactgaataggtttttatcagtcattccagagatgttagatccttgttaaggcttcttgtaaacaattttgtcttgtcaggaacagcctcaaccatcaggaaaacaagagtcaggttcagaaatccatgtggaagtgaaggcacaaagcttggttataagccctccagctcctagtcctaggaaaactccagttgccagtgatcaacgccgtaggtcctgcaaaacagcccctgcttccagcagcaaatctcagacagaggttcctaagagaggagggagaaagagtggcaacctgccttcaaagagagtgtctatcagccgaagtcaacatgatattttacagatgatatgttccaaaagaagaagtggtgcttcggaagcaaatctgattggttagtctgacattagaatacatatattaaggtgaattttttcatgaatgctaatttttgaaaagtttcgtcttttccctttgacagttgcaaaatcatgggcagatgtagtaaaacttggtgcaaaacaaacacaaactaaagtcataaaacatggtcctcaaaggtcaatgaacaaaaggcaaagaagacctgctactccaaaggtaggggcctcactgaatggctgctttacacataccggtgtcatcgaagcttgcattcagtgtggatttatgctttaatgtcctgtttacctccttcctgttttctacagaagcctgtgggcgaagttcacagtcaatttagtacaggccacgcaaactctccttgtaccataataatagggaaagctcatactgaaaaagtacatgtgcctgctcgaccctacagagtgctcaacaacttcatttccaaccaaaaaatggactttaaggaagatctttcaggtaaaaacgtagtcttagatcttataaatcttttgactctactgttttttactgtgttaatgtttgttttgctaactttgtttatctgctgtgaaagagattataaaataaacgactcaatcacccttctggggtcttagtgttcagggaagataaagctgttttggcttgcaaagacaagtctctgctaatttttgggatcacatgtcctgcatgaaataggtgtggaaatgtcaaatgcatgtctttaccctggagagcagcgtatacatagaaagctggaaggtgctttacagtgaagagagttaacttgttaatctgcaggtacaataatagtttatcccaggtgtgggccagttgttgttgagcaacattttgcttcttcaggattgactttctaggtagcttaactttcttgaaagaaagccctatgagaagattcccataaacgattgttgaagaaatatttccattcaattcccactctcagtaaattgtggcctgacttgtgtaatttaaagtggggatggccggcgcagtggctcacgcctgtaatcccaacactttgggaggctgaggcctcctatcattccaaacagaatgataatgatattagattttcaaaaatatatattattacttgacagtactaaaaatgggcagctctttgtcattttctaaaatgtgggtacgtgttatttgtacttaaaatctagaactgagcacccaagactttgagaagcatgaaggcatttggcctctagatcctagcagggaggcctatgggtctcaggagcccgtcaccagcctccgtgctccagagctcacgtgtggggtcttgttaggaggacccagaggtcagctaacttcatttgtttcctttccaagaaaagcaaagcgaagagcataacatatcttctctgtgctctcttttttacaaaatgagtacattattaatggaatcactctttttatgaggcctatgtaccaggatttcaagggaggaatctactgttatttcccaccatttgcacgttacatgtgagggctgggatggttgtctgcatgttagcaatatgtcaatcacttttcaaatattttcatttaacaggaatagctgaaatgttcaagaccccagtgaaggagcaaccgcagttgacaagcacatgtcacatcgctatttcaaattcagagaatttgcttggaaaacagtttcaaggaactgattcaggagaagaacctctgctccccacctcagagagttttggttggtttccttgtttcctaacactgtgatgttttgggataggaacatacagtattatttttttacaagcagtatgatattacttctctaaaacaaatgttcctggcacaaaataccatttccgtcttctctgttctaattgaaagggagatttcaatcagcagttgaactaacattggcattcattgacttatatagaaagaaagactccgttaatgtgtgtaaatgacctgtgtacacttttggcttctttattgtaagtaaccagggtgacatagcaaaaaaatacaatggtgtctcaccatatttacatataaattactcatattcaaaattactgccaattacaaaacagaaagataacagtttgtatactgtgcaattattcctgctaaccttttaggtgggagcaggcccggggtaagtgtgagatgggagatgagaatctgtctaatctctcatttggcactggtcactgtattcctgtcacagagggaacagcttgctaccctgaagatgtttgcggtaggtaaatatttcctgtgtaatatggaccctaaccacataaggataatccatgttattttattggcgatttaaggcaagaaacagctgtttgtttctaatgtttgaaggaaaaaatgcctatatttacgtcaatgacacagggcatggcaacctttggaggaaccttctgaagcagtatttttaccttctatgatcatttcagcatctaactttgcttaatgatgaccccactatagcaccaaataacattattcttaattgtgcatggctcttataagacagatttatagacacataagtagcctcatgtcgttcagtgaatacgaagctaaatatttagttttttaccatattttatgaggctgtaatactcgattgacatgagacactaatagaatgtttttattgtgtatgtttttatttcaggaggaaatgtgttcttcagtgcacagaatgcagcaaaacagccatctgataaatgctctgcaagccctcccttaagacggcagtgtattagagaaaatggaaacgtagcaaaaacgcccaggaacacctacaaaatgacttctctggagacaaaaacttcagatactgagacagagccttcaaaaacagtatccactgcaaacaggtcaggaaggtctacagagttcaggaatatacagaagctacctgtggaaagtaagagtgaagaaacaaatacagaaattgttgagtgcatcctaaaaagaggtcagaaggcaacactactacaacaaaggagagaaggagagatgaaggaaatagaaagaccttttgagacatataaggaaaatattgaattaaaagaaaacgatgaaaagatgaaagcaatgaagagatcaagaacttgggggcagaaatgtgcaccaatgtctgacctgacagacctcaagagcttgcctgatacagaactcatgaaagacacggcacgtggccagaatctcctccaaacccaagatcatgccaaggcaccaaagagtgagaaaggcaaaatcactaaaatgccctgccagtcattacaaccagaaccaataaacaccccaacacacacaaaacaacagttgaaggcatccctggggaaagtaggtgtgaaagaagagctcctagcagtcggcaagttcacacggacgtcaggggagaccacgcacacgcacagagagccagcaggagatggcaagagcatcagaacgtttaaggagtctccaaagcagatcctggacccagcagcccgtgtaactggaatgaagaagtggccaagaacgcctaaggaagaggcccagtcactagaagacctggctggcttcaaagagctcttccagacaccaggtccctctgaggaatcaatgactgatgagaaaactaccaaaatagcctgcaaatctccaccaccagaatcagtggacactccaacaagcacaaagcaatggcctaagagaagtctcaggaaagcagatgtagaggaagaattcttagcactcaggaaactaacaccatcagcagggaaagccatgcttacgcccaaaccagcaggaggtgatgagaaagacattaaagcatttatgggaactccagtgcagaaactggacctggcaggaactttacctggcagcaaaagacagctacagactcctaaggaaaaggcccaggctctagaagacctggctggctttaaagagctcttccagactcctggtcacaccgaggaattagtggctgctggtaaaaccactaaaataccctgcgactctccacagtcagacccagtggacaccccaacaagcacaaagcaacgacccaagagaagtatcaggaaagcagatgtagagggagaactcttagcgtgcaggaatctaatgccatcagcaggcaaagccatgcacacgcctaaaccatcagtaggtgaagagaaagacatcatcatatttgtgggaactccagtgcagaaactggacctgacagagaacttaaccggcagcaagagacggccacaaactcctaaggaagaggcccaggctctggaagacctgactggctttaaagagctcttccagacccctggtcatactgaagaagcagtggctgctggcaaaactactaaaatgccctgcgaatcttctccaccagaatcagcagacaccccaacaagcacaagaaggcagcccaagacacctttggagaaaagggacgtacagaaggagctctcagccctgaagaagctcacacagacatcaggggaaaccacacacacagataaagtaccaggaggtgaggataaaagcatcaacgcgtttagggaaactgcaaaacagaaactggacccagcagcaagtgtaactggtagcaagaggcacccaaaaactaaggaaaaggcccaacccctagaagacctggctggcttgaaagagctcttccagacaccagtatgcactgacaagcccacgactcacgagaaaactaccaaaatagcctgcagatcacaaccagacccagtggacacaccaacaagctccaagccacagtccaagagaagtctcaggaaagtggacgtagaagaagaattcttcgcactcaggaaacgaacaccatcagcaggcaaagccatgcacacacccaaaccagcagtaagtggtgagaaaaacatctacgcatttatgggaactccagtgcagaaactggacctgacagagaacttaactggcagcaagagacggctacaaactcctaaggaaaaggcccaggctctagaagacctggctggctttaaagagctcttccagacacgaggtcacactgaggaatcaatgactaacgataaaactgccaaagtagcctgcaaatcttcacaaccagacccagacaaaaacccagcaagctccaagcgacggctcaagacatccctggggaaagtgggcgtgaaagaagagctcctagcagttggcaagctcacacagacatcaggagagactacacacacacacacagagccaacaggagatggtaagagcatgaaagcatttatggagtctccaaagcagatcttagactcagcagcaagtctaactggcagcaagaggcagctgagaactcctaagggaaagtctgaagtccctgaagacctggccggcttcatcgagctcttccagacaccaagtcacactaaggaatcaatgactaacgaaaaaactaccaaagtatcctacagagcttcacagccagacctagtggacaccccaacaagctccaagccacagcccaagagaagtctcaggaaagcagacactgaagaagaatttttagcatttaggaaacaaacgccatcagcaggcaaagccatgcacacacccaaaccagcagtaggtgaagagaaagacatcaacacgtttttgggaactccagtgcagaaactggaccagccaggaaatttacctggcagcaatagacggctacaaactcgtaaggaaaaggcccaggctctagaagaactgactggcttcagagagcttttccagacaccatgcactgataaccccacgactgatgagaaaactaccaaaaaaatactctgcaaatctccgcaatcagacccagcggacaccccaacaaacacaaagcaacggcccaagagaagcctcaagaaagcagacgtagaggaagaatttttagcattcaggaaactaacaccatcagcaggcaaagccatgcacacgcctaaagcagcagtaggtgaagagaaagacatcaacacatttgtggggactccagtggagaaactggacctgctaggaaatttacctggcagcaagagacggccacaaactcctaaagaaaaggccaaggctctagaagatctggctggcttcaaagagctcttccagacaccaggtcacactgaggaatcaatgaccgatgacaaaatcacagaagtatcctgcaaatctccacaaccagacccagtcaaaaccccaacaagctccaagcaacgactcaagatatccttggggaaagtaggtgtgaaagaagaggtcctaccagtcggcaagctcacacagacgtcagggaagaccacacagacacacagagagacagcaggagatggaaagagcatcaaagcgtttaaggaatctgcaaagcagatgctggacccagcaaactatggaactgggatggagaggtggccaagaacacctaaggaagaggcccaatcactagaagacctggccggcttcaaagagctcttccagacaccagaccacactgaggaatcaacaactgatgacaaaactaccaaaatagcctgcaaatctccaccaccagaatcaatggacactccaacaagcacaaggaggcggcccaaaacacctttggggaaaagggatatagtggaagagctctcagccctgaagcagctcacacagaccacacacacagacaaagtaccaggagatgaggataaaggcatcaacgtgttcagggaaactgcaaaacagaaactggacccagcagcaagtgtaactggtagcaagaggcagccaagaactcctaagggaaaagcccaacccctagaagacttggctggcttgaaagagctcttccagacaccaatatgcactgacaagcccacgactcatgagaaaactaccaaaatagcctgcagatctccacaaccagacccagtgggtaccccaacaatcttcaagccacagtccaagagaagtctcaggaaagcagacgtagaggaagaatccttagcactcaggaaacgaacaccatcagtagggaaagctatggacacacccaaaccagcaggaggtgatgagaaagacatgaaagcatttatgggaactccagtgcagaaattggacctgccaggaaatttacctggcagcaaaagatggccacaaactcctaaggaaaaggcccaggctctagaagacctggctggcttcaaagagctcttccagacaccaggcactgacaagcccacgactgatgagaaaactaccaaaatagcctgcaaatctccacaaccagacccagtggacaccccagcaagcacaaagcaacggcccaagagaaacctcaggaaagcagacgtagaggaagaatttttagcactcaggaaacgaacaccatcagcaggcaaagccatggacacaccaaaaccagcagtaagtgatgagaaaaatatcaacacatttgtggaaactccagtgcagaaactggacctgctaggaaatttacctggcagcaagagacagccacagactcctaaggaaaaggctgaggctctagaggacctggttggcttcaaagaactcttccagacaccaggtcacactgaggaatcaatgactgatgacaaaatcacagaagtatcctgtaaatctccacagccagagtcattcaaaacctcaagaagctccaagcaaaggctcaagatacccctggtgaaagtggacatgaaagaagagcccctagcagtcagcaagctcacacggacatcaggggagactacgcaaacacacacagagccaacaggagatagtaagagcatcaaagcgtttaaggagtctccaaagcagatcctggacccagcagcaagtgtaactggtagcaggaggcagctgagaactcgtaaggaaaaggcccgtgctctagaagacctggttgacttcaaagagctcttctcagcaccaggtcacactgaagagtcaatgactattgacaaaaacacaaaaattccctgcaaatctcccccaccagaactaacagacactgccacgagcacaaagagatgccccaagacacgtcccaggaaagaagtaaaagaggagctctcagcagttgagaggctcacgcaaacatcagggcaaagcacacacacacacaaagaaccagcaagcggtgatgagggcatcaaagtattgaagcaacgtgcaaagaagaaaccaaacccagtagaagaggaacccagcaggagaaggccaagagcacctaaggaaaaggcccaacccctggaagacctggccggcttcacagagctctctgaaacatcaggtcacactcaggaatcactgactgctggcaaagccactaaaataccctgcgaatctcccccactagaagtggtagacaccacagcaagcacaaagaggcatctcaggacacgtgtgcagaaggtacaagtaaaagaagagccttcagcagtcaagttcacacaaacatcaggggaaaccacggatgcagacaaagaaccagcaggtgaagataaaggcatcaaagcattgaaggaatctgcaaaacagacaccggctccagcagcaagtgtaactggcagcaggagacggccaagagcacccagggaaagtgcccaagccatagaagacctagctggcttcaaagacccagcagcaggtcacactgaagaatcaatgactgatgacaaaaccactaaaataccctgcaaatcatcaccagaactagaagacaccgcaacaagctcaaagagacggcccaggacacgtgcccagaaagtagaagtgaaggaggagctgttagcagttggcaagctcacacaaacctcaggggagaccacgcacaccgacaaagagccggtaggtgagggcaaaggcacgaaagcatttaagcaacctgcaaagcggaagctggacgcagaagatgtaattggcagcaggagacagccaagagcacctaaggaaaaggcccaacccctggaagatctggccagcttccaagagctctctcaaacaccaggccacactgaggaactggcaaatggtgctgctgatagctttacaagcgctccaaagcaaacacctgacagtggaaaacctctaaaaatatccagaagagttcttcgggcccctaaagtagaacccgtgggagacgtggtaagcaccagagaccctgtaaaatcacaaagcaaaagcaacacttccctgcccccactgcccttcaagaggggaggtggcaaagatggaagcgtcacgggaaccaagaggctgcgctgcatgccagcaccagaggaaattgtggaggagctgccagccagcaagaagcagagggttgctcccagggcaagaggcaaatcatccgaacccgtggtcatcatgaagagaagtttgaggacttctgcaaaaagaattgaacctgcggaagagctgaacagcaacgacatgaaaaccaacaaagaggaacacaaattacaagactcggtccctgaaaataaggtgagaggaagtattacagcatcactcaatatcgtcttggatagttgtgaatttctgtgttatactttgcatgtaacctgacgttataagtggttatcctttccccagagggtttcctttaacactgaataactgcaggccatggtaaagaatcttcttgggacctatagagggaatagactaatatgggaaaagaactagtcaaacatgattaatgcaaacttagaagagtttctcaaaagccaaatgagtaatgttcatcttcaaatgtttaaaaaattgatcagaggataggtgggtggttcagttctatgttctggatactgtcaccaagaccaggactgggttaaaaatcctatctatgtcactattttaactatcagaacaatatcaataaggaatgtgtattcttgagaaggggaaactgtctggactgttagatagagaggctcccactgcatgcagagaagtttggggaaactccagaaatggcaatttcctgttctgccttagcagtgatggttaaaggaataggaattcatttactccctgtaaatgaatgaataacggaccttctttctataatgtaaactgtaaaaattagatttgatatatatcttattaggcattgttattgaaatttatcctgaattccttatttataatttgtcagcagagacagtcatttctccataggagcaaagtaccaaggcattaccttgactatcctagatgacaagtctcttagacaattcatcagtgtgtgattttcaaatgatttctccttttaggttactgttgattgtgctccctgttgaattttgaagtttgttttactaattattggaattttgtggatgtcttctcatttctttagggaatatccctgcgctccagacgccaaaataagactgaggcagaacagcaaataactgaggtctttgtattagcagaaagaatagaaataaacagaaatgaaaagaagcccatgaagacctccccagagatggacattcagaatccagatgatggagcccggaaacccatacctagagacaaagtcactgagaacaaaaggtgcttgaggtctgctagacagaatgagagctcccagcctaaggtggcagaggagagcggagggcagaagagtgcgaaggttctcatgcagaatcagaaagggaaaggagaagcaggaaattcagactccatgtgcctgagatcaagaaagacaaaaagccagcctgcagcaagcactttggagagcaaatctgtgcagagagtaacgcggagtgtcaagaggtgtgcagaaaatccaaagaaggtaagccatttactgtttccctgttttaaaagacacagaatgttttgatgtattttttgcccaaggttgcaaaggcaaacaaaaagcattatcttcaacagcactctgccagctcccagttacattaatggaaggagcattatgctaagacataaatttggtcattttagttatattttgttgtgtctactttgggaatttcacttcaaatagcaaattcacgttatgaagactttcttcagaaagaaaaggaatttgtctagtggctaatttctgactgcttatgatgtacctcatgatacaattgtaggtagatgtcttcagcctttctgtagttcaaaatcacctcttgaaacaggaaaattctttttccaaaaaaaactattgaaacagaaaaatttccaaggcattctttggaaaggcagaaggaacagaagttgggatgtccctgagacacatgctcactatgtgagagttcctggtcagtgggggatgcgtctgccctccaaccctcctccagccagagactatctaagctaatgaactttaagtgctactgaaatcacatcaagttgagccactcataattacaagcatgtggacaaatccataagaatgattagattccattagtgttcttctggggaatacttggtttagctaaaataaaaataggttgaattgctccctttttgtgagcaattcacaaaaatataatataaatttaattcttagcacacacaaaatttggacctaaaactaccatattctgagttcagcaaacgaaactcatgtagcaataacctcttcagatacagaattctggcaagtacagctgtccagacagaccctcttcggcacaaactaggaagcttcaactgccaagaaaaggaaagattcccaggtgtccccagtacctgctgcatagccaggcagccagtggagggggagggcttgtgtgtctggatggtgggcaggaagtcctagtggggagatgcccatagactgttccagagagggaagaggagaggctcaagaagggcactgatgcccacacaggtgtcctaagtcagagactgtacttctggggcaggctggaagcagaagacacccgacagtgccagacaaggtcctagaaaccacaggcacaccagggacgcaacagctgacgtgggtcagcacgttcacccgtcgagtcttacaataaaacgcaggctccaggcgcttaccgaattcacagtctggaaggtgctgcttcctcagaatgaaaccaaagaagggtgaaagcgaatcttttaactaggatgattcctaaacacagagcaaccaggcccaaggctgagccaggcctggtgtgttctgccgggggcgttccagcctcttctcacacacaagcacccaggagacgcccaacacacacatgctcctctttgccgagctcttcggtgggtgtcggtagtcctagaaaatgcatatataagatagattttttccagtaagaagcttgtagccatgcttttcaccatggttcctctcccttagccaaggggtgagaactactgcaagagtaaaggccaaggcaggtctcctgcatgcaagttgggcatgcttctgtctacaggggttccttggtttaggagacccaaaagacttaatcctggttggattcactttttctgagtgacattttttagtttgtgaaaatgtgtgcatcgatgaagaaattttattatgaattagcttaaaaatgcattaggaacttctgtatgaaaagatcacattatttaagtgtaaaaaaactgcataataaaagcagttcaagtcaagaaaaacaatgttaatggaatatattttaaaacttatttccaacctcaaaattaattttctgcaactaaggacctgcataatacctagtaagcctttggggttttgcagaggaggtcgattctaaaaatgggtgtttaaattacttaagagttctattttttttcttcccacacaggctgaggacaatgtgtgtgtcaagaaaataagaaccagaagtcatagggacagtgaagatatttgacagaaaaatcgaactgggaaaaatataataaagttagttttgtgataagttctagtgcagtttttgtcataaattacaagtgaattctgtaagtaaggctgtcagtctgcttaagggaagaaaactttggatttgctgggtctgaatcggcttcataaactccactgggagcactgctgggctcctggactgagaatagttgaacaccgggggctttgtgaaggagtctgggccaaggtttgccctcagctttgcagaatgaagccttgaggtctgtcaccacccacagccaccctacagcagccttaactgtgacacttgccacactgtgtcgtcgtttgtttgcctatgtcctccagggcacggtggcaggaacaactatcctcgtctgtcccaacactgagcaggcactcggtaaacacgaatgaatggatgagcgcacggatgaatggagcttacaagatctgtctttccaatggccgggggcatttggtccccaaattaaggctattggacatctgcacaggacagtcctatttttgatgtcctttcctttctgaaaataaagttttgtgctttggagaatgactcgtgagcacatctttagggaccaagagtgactttctgtaaggagtgactcgtggcttgccttggtctcttgggaatacttttctaactagggttgctctcacctgagacattctccacccgcggaatctcagggtcccaggctgtgggccatcacgacctcaaactggctcctaatctccagctttcctgtcattgaaagcttcggaagtttactggctctgctcccgcctgttttctttctgactctatctggcagcccgatgccacccagtacaggaagtgacaccagtactctgtaaagcatcatcatccttggagagactgagcactcagcaccttcagccacgatttcaggatcgcttccttgtgagccgctgcctccgaaatctcctttgaagcccagacatctttctccagcttcagacttgtagatataactcgttcatcttcatttactttccactttgccccctgtcctctctgtgttccccaaatcagagaatagcccgccatcccccaggtcacctgtctggattcctccccattcacccaccttgccaggtgcaggtgaggatggtgcaccagacagggtagctgtcccccaaaatgtgccctgtgcgggcagtgccctgtctccacgtttgtttccccagtgtctggcggggagccaggtgacatcataaatacttgctgaatgaatgcagaaatcagcggtactgacttgtactatattggctgccatgatagggttctcacagcgtcatccatgatcgtaagggagaatgacattctgcttgagggagggaatagaaaggggcagggaggggacatctgagggcttcacagggctgcaaagggtacagggattgcaccagggcagaacaggggagggtgttcaaggaagagtggctcttagcagaggcactttggaaggtgtgaggcataaatgcttccttctacgtaggccaacctcaaaactttcagtaggaatgttgctatgatcaagttgttctaacactttagacttagtagtaattatgaacctcacatagaaaaatttcatccagccatatgcctgtggagtggaatattctgtttagtagaaaaatcctttagagttcagctctaaccagaaatcttgctgaagtatgtcagcaccttttctcaccctggtaagtacagtatttcaagagcacgctaagggtggttttcattttacagggctgttgatgatgggttaaaaatgttcatttaagggctacccccgtgtttaatagatgaacaccacttctacacaaccctccttggtactgggggagggagagatctgacaaatactgcccattcccctaggctgactggatttgagaacaaatacccacccatttccaccatggtatggtaacttctctgagcttcagtttccaagtgaatttccatgtaataggacattcccattaaatacaagctgtttttactttttcgcctcccagggcctgtgggatctggtcccccagcctctcttgggctttcttacactaactctgtacctaccatctcctgcctcccttaggcaggcacctccaaccaccacacactccctgctgttttccctgcctggaactttccctcctgccccaccaagatcatttcatccagtcctgagctcagcttaagggaggcttcttgcctgtgggttccctcacccccatgcctgtcctccaggctggggcaggttcttagtttgcctggaattgttctgtacctctttgtagcacgtagtgttgtggaaactaagccactaattgagtttctggctcccctcctggggttgtaagttttgttcattcatgagggccgactgcatttcctggttactctatcccagtgaccagccacaggagatgtccaataaagtatgtgatgaaatggtcttaaaacccatggtatttttattatagggagagtggggaaagaaactaagtgtgggtggggcagacaggccagtgtaagagagactggttcattacgttccattttcatttctacaaggacttggctggatggtcattttctctcttggccaataagtcatcgcagctgcttttagtcctgcaggaatggcctgctgtatctcgagaactacctgcaaccgcagctgtgcctgctttgttgcaacagaggtgctgagttgagggatggggatttgacccagggctgccccaagtcagcagatgaaaatacatgccctgactttcctctggcaaccctgatttgacatggatcccgggagtgaatttgctggcaagttccaggggcagtagcctgcggtaggtcagttagtcctgaagaagaggcctttctgtcggagagaaaagtttgcaggtgggtgcatctaccatcttgagaggctgaggagggagggagagccgtgctcggtggtcagtctggtgaaggaagtgggttcagtctgcagcccacatcctgggctgtcatcaagaattaacatggcaaacggcgactccataaagtaaactgta

SEQ ID NO: 625-627 - skipped (3 entries)

SEQ ID NO: 628 - protein, 288 aa, Homo sapiens
MQIPQAPWPVVWAVLQLGWRPGWFLDSPDRPWNPPTFSPALLVVTEGDNATFTCSFSNTSESFVLNWYRMSPSNQTDKLAAFPEDRSQPGQDCRFRVTQLPNGRDFHMSVVRARRNDSGTYLCGAISLAPKAQIKESLRAELRVTERRAEVPTAHPSPSPRPAGQFQTLVVGVVGGLLGSLVLLVWVLAVICSRAARGTIGARRTGQPLKEDPSAVPVFSVDYGELDFQWREKTPEPPVPCVPEQTEYATIVFPSGMGTSSPARRGSADGPRSAQPLRPEDGHCSWPL

SEQ ID NO: 629 - DNA, 867 bp, Homo sapiens
  source 1..867: mol_type = genomic DNA
atgcagatcccacaggcgccctggccagtcgtctgggcggtgctacaactgggctggcggccaggatggttcttagactccccagacaggccctggaacccccccaccttctccccagccctgctcgtggtgaccgaaggggacaacgccaccttcacctgcagcttctccaacacatcggagagcttcgtgctaaactggtaccgcatgagccccagcaaccagacggacaagctggccgccttccccgaggaccgcagccagcccggccaggactgccgcttccgtgtcacacaactgcccaacgggcgtgacttccacatgagcgtggtcagggcccggcgcaatgacagcggcacctacctctgtggggccatctccctggcccccaaggcgcagatcaaagagagcctgcgggcagagctcagggtgacagagagaagggcagaagtgcccacagcccaccccagcccctcacccaggccagccggccagttccaaaccctggtggttggtgtcgtgggcggcctgctgggcagcctggtgctgctagtctgggtcctggccgtcatctgctcccgggccgcacgagggacaataggagccaggcgcaccggccagcccctgaaggaggacccctcagccgtgcctgtgttctctgtggactatggggagctggatttccagtggcgagagaagaccccggagccccccgtgccctgtgtccctgagcagacggagtatgccaccattgtctttcctagcggaatgggcacctcatcccccgcccgcaggggctcagccgacggccctcggagtgcccagccactgaggcctgaggatggacactgctcttggcccctctga

SEQ ID NO: 630 - DNA, 10211 bp, Homo sapiens
  source 1..10211: mol_type = genomic DNA
cagttgtcattcagtagggtcacctgtgccccagcgaagggggatgggccgggaaggcagaggccaggcacctgcccccagcaggggcagaggctgtgggcagccgggaggctcccagaggctccgacagaatgggagtggggttgagcccacccctcactgcagcccaggaacctgagcccagagggggccacccaccttccccaggcagggaggcccggcccccagggagatgggggggatgggggaggagaagggcctgcccccacccggcagcctcaggaggggcagctcgggcgggatatggaaagaggccacagcagtgagcagagacacagaggaggaaggggccctgagctggggagacccccacggggtagggcgtgggggccacgggcccacctcctccccatctcctctgtctccctgtctctgtctctctctccctcccccaccctctccccagtcctaccccctcctcacccctcctcccccagcactgcctctgtcactctcgcccacgtggatgtggaggaagagggggcgggagcaaggggcgggcaccctcccttcaacctgacctgggacagtttcccttccgctcacctccgcctgagcagtggagaaggcggcactctggtggggctgctccaggcatgcagatcccacaggcgccctggccagtcgtctgggcggtgctacaactgggctggcggccaggatggttcttaggtaggtggggtcggcggtcaggtgtcccagagccaggggtctggagggaccttccaccctcagtccctggcaggtcggggggtgctgaggcgggcctggccctggcagcccaggggtcccggagcgaggggtctggagggacctttcactctcagtccctggcaggtcggggggtgctgtggcaggcccagccttggcccccagctctgccccttaccctgagctgtgtggctttgggcagctcgaactcctgggttcctctctgggccccaactcctcccctggcccaagtcccctctttgctcctgggcaggcaggacctctgtcccctctcagccggtccttggggctgcgtgtttctgtagaatgacgggtcaggctggccagaaccccaaaccttggccgtggggagtctgcgtggcggctctgccttgcccaggcatccttggtcctcactcgagttttcctaaggatgggatgagccccatgtgggactaaccttggctttacgacgtcaaagtttagatgagctggtgatatttttctcattatatccaaagtgtacctgttcgagtgaggacagttcttctgtctccaggatccctcctgggtggggattgtgcccgcctgggtctctgcccagattccagggctctccccgagccctgttcagaccatccgtgggggaggccttggcctcactctcccggatcgaggagagagggagcctcttcctgggctgcccgtgaccctgggccctctgtgtacactgtgaccacagcccgctcctggaccctctgtgcccggctggccctctgtgcccagccagcctgcacctggggatgccaaggcctggggagggtggtttcacccaggccaagcctaagacagtccctctgggccctgctgggtaccggggtgtgacaccactgggaggacaagatgaggggcacccctggggccgccctgacaccccctcgaggctcctgccccgggggtcctggtgccccttcactgtggcaggcgactgggggttccccacctcggcccctctcccggggcctgctccccggcacctgaggcagcatccttgtcagggccgtgccttcctgcctcagcgccacctcttaaggttggcccgtgggtcactcaggactcagaactggagattctgggcaaaaggcaaagagcaaagggccaaaaggcatcccagggagacgactgcgggggaaccagagggcagaggggcgctcgtcacaggggagggggagctgagcgaggcaggaggggagccgagcctctccccccgtgtcccggctcttcaggcacgccctcgggacgccaccctccccgacccaggcgggaaagataagagcaaggtgtccgcagcctgacactcgtgcctcaggtgcccgcgcttgtgccggacaagactctcacaggtggcatgcctcggtttccccactggtaacagcacagggcactcagcaaggcgcagtgggcatgactggggtcctgtgggtcctgacccagatgtggccaccccggccgcagtggtcttcattccaggatgcctcttttccctcctgatctattcactgcgttcgccattcggtcattcccggggccaccactcccacctcaggtgtgtgcttcccttgtgttttatgagatatccccaacccggctgcttattggccccgtccgagggcaggagcataaataagagcctctgctttggcgtgggaccactgtgagctccagtcagcgctgccactgctgagctctgggccttcgacaggacttggccccttactgacttctccgtgtgctttgggtcatgggtgaggacgcctcctggcaaggctgcgtcctgaggattaaatcgggtcatctgtgaaaactacccagcccagcccctgacacttttttgtttgtttcttttagtgacagggtcttgctctgtcacccaggctggagtgcagtggtgtgatctcggctcactcgacctccggggctcaagcaattctcccacctctgcctccagagtagctgggactataggcacgtgccaccctgccaggctaatttcttccattttttttagagacagggtctcgctatgttccccaggctgggctcaaatggtcctcccacctcagcctccccaagtactgggattacaggcataagccactgcatctggcctccatgacacatatttttaaagtctgatttttaaagtcaaacttttgaagtcagattttaaacggactattttgaaaaatatacaaaaacgtttaaaaacaatgaatatccctcacctagaatcaataactaagaatattgacacatttgctttggggactgggcggctggagctgccatgacaaagctccgccgaccgagtggcttttaaacagagcctgccctctcgccgactgagggctggacgtgcaggatggagctccgcagggtcggctcccctgtgctctgaggggctctgctcagcctctcccggctgtggcttaaaaacagagcctgtcctcccgccgtggggggctggacatgcaggaccgaggggccacagggtcggctccctgtgctccgagagggctctgctcagcttctcctggctggggggttttgtggccaccctctgtgttcctgggttcagaagcatcccccaggctctgccttcatctctgcacgggtgactctgtacaggaagccaggcctgctggtcaatggccacccagccctgtgccctcatcttacctagtcccagctgccgtcaccctattcctaataaggccgccttctgaggtcatggggttaggacttccacataggaatctgtggggacacggttcggcccacagcccttcccacctccacacacacacacgactgtgaggagttggaagacctcactcctcacccctgccaggtcctctagggacaagctcgctgtcctcatcccagcacagcccgtgggacggtttccttgtccctaatgggaccacggtcagagatgccgggtctggtctgggccagcaggttcctccgcccggggcaggcagccttcttctgtgcgcttctggaaagcaatgtcctgtaatgcggtctctctgcgggagcacccccaccgccacctcacaggcctgttccacagccccgggatgggctctgtctccctcctgaccctgcatagggcacagccctctctcatcaacccacgatcctacgtggatccgagagggagcacctggggaaacaatggaatcccatagaaacaccccaaatctaacttgatccaggaccagccagtggtcacttctgaatattcaccttcctagtagacactaccagccaagggaggccaggaagccttcctggaggaggtggcctgaggactggggtgaggcaggccctgcgtgggggtcgccacccagcacccccacactgggtgggagccagtctctgagactggctgggggaggtgggagagggggctgcttgaactgcagacaccgaggtctagcccccaccccacccagccagttggtggaggcaggggaggccgaggggcccagctggacctgctccccggggtggattccaaaataggggggttggggggggcggaacaggagcccagggtcctggcttgaggcccagtggctgagggctggtgcaagccagacaggaaaagggttgagcctgtcagcgccagcacagatcaagtcaggagcaggtccctccaccaatgtgtgcaaataaatagcagctaagtttccagttacaagaacaatgcacagatggtcccagggacattgcggtgtggacacacagcggccattgtcctgtcgccagcacctcgccctacagctggggggtcccttagcacttcctagccatgcagggtccctgctcacagtacccgtgatgacttctgttcctcacctgcctgtctgtcccgacagctgcatggcagccctggcctgggagatggagaccccgaggggctgcctgcggtggtggggcccctgggtccccactgcattcccagaaacccagagggcagggcatttcccctgctctgtgccgagtccacccagccccagcctaggcccagtaagggctgcagcccaccctgtcccaggctgcctcccaggagccctcttggccctgatgccagaagcccatcttcctccattcaggcaggtctctgagtgccctggcctggctgcctgctggccctgagagtcacactaccccacagccctccttggtcaaaatccactctggagtggctggaagattccccgggcccacgccgcacacgcctatgcagggagcttcccctggccggccggcagacaagggcggtctcagagagggggctcacctcagcagccccttgtgtagctggccctcgcccctgccacctctgggaacaccaccaggaagctgggggacaggcacgcaggtgaaggaggcgagcgcttgtcagccgggaggccatgggcacagagggaacagggacaccctgggtggcctcaaggtcacttcaaacccctcactcgtcccctgggagggtgcccagtgaggttggcactaggagttggtcctggtcacatgacagacccacccacctctggtgtccagccagcacgccgtgggccagcctggctgcagggacacgagggcagcagccccctcctcctctgagctggttgctccttgagtcatcaccaccgcctgccacggaggccgcctgtcccaggaagcagagggaccgcagctgtggcaaccagggcctggtctctgtgtcacctcgctggggggccgtgcccaggcctgagacggaactgagtgacagtgcactgggtctgacagtgtggggctggcgccatgtttggggaaccctgtggcatgggacctgtgggtgagccgggaaaatcaccccgttgcatggcatctcgggcctggatcttaagcgcctgtgttggtgcctccgcctggcggaagagccgcgacccccacgttgccatgcgggtatcccaagccctgaccctggcaggcatatgtttcaggaggtccttgtcttgggagcccagggtcgggggccccgtgtctgtccacatccgagtcaatggcccatctcgtctctgaagcatctttgctgtgagctctagtccccactgtcttgctggaaaatgtggaggccccactgcccactgcccagggcagcaatgcccataccacgtggtcccagctccgagcttgtcctgaaaagggggcaaagactggaccctgagcctgccaaggggccacactcctcccagggctggggtctccatgggcagccccccacccacccagaccagttacactcccctgtgccagagcagtgcagacaggaccaggccaggatgcccaagggtcaggggctggggatgggtagcccccaaacagccctttctgggggaactggcctcaacggggaagggggtgaaggctcttagtaggaaatcagggagacccaagtcagagccaggtgctgtgcagaagctgcagcctcacgtagaaggaagaggctctgcagtggaggccagtgcccatccccgggtggcagaggccccagcagagacttctcaatgacattccagctggggtggcccttccagagcccttgctgcccgagggatgtgagcaggtggccggggaggctttgtggggccacccagccccttcctcacctctctccatctctcagactccccagacaggccctggaacccccccaccttctccccagccctgctcgtggtgaccgaaggggacaacgccaccttcacctgcagcttctccaacacatcggagagcttcgtgctaaactggtaccgcatgagccccagcaaccagacggacaagctggccgccttccccgaggaccgcagccagcccggccaggactgccgcttccgtgtcacacaactgcccaacgggcgtgacttccacatgagcgtggtcagggcccggcgcaatgacagcggcacctacctctgtggggccatctccctggcccccaaggcgcagatcaaagagagcctgcgggcagagctcagggtgacaggtgcggcctcggaggccccggggcaggggtgagctgagccggtcctggggtgggtgtcccctcctgcacaggatcaggagctccagggtcgtagggcagggaccccccagctccagtccagggctctgtcctgcacctggggaatggtgaccggcatctctgtcctctagctctggaagcaccccagcccctctagtctgccctcacccctgaccctgaccctccaccctgaccccgtcctaacccctgacctttgtgcccttccagagagaagggcagaagtgcccacagcccaccccagcccctcacccaggccagccggccagttccaaaccctggtggttggtgtcgtgggcggcctgctgggcagcctggtgctgctagtctgggtcctggccgtcatctgctcccgggccgcacgaggtaacgtcatcccagcccctcggcctgccctgccctaaccctgctggcggccctcactcccgcctccccttcctccacccttccctcaccccaccccacctccccccatctccccgccaggctaagtccctgatgaaggcccctggactaagaccccccacctaggagcacggctcagggtcggcctggtgaccccaagtgtgtttctctgcagggacaataggagccaggcgcaccggccagcccctggtgagtctcactcttttcctgcatgatccactgtgccttccttcctgggtgggcagaggtggaaggacaggctgggaccacacggcctgcaggactcacattctattatagccaggaccccacctccccagcccccaggcagcaacctcaatccctaaagccatgatctggggccccagcccacctgcggtctccgggggtgcccggcccatgtgtgtgcctgcctgcggtctccaggggtgcctggcccacgcgtgtgcccgcctgcggtctctgggggtgcccggcccacatatgtgcctgcctgcggtctccaggtgtgcccggcccatgcgtgtgcccacctgcgagggcgtggggtgggcttggtcatttcttatcttacattggagacaggagagcttgaaaagtcacattttggaatcctaaatctgcaagaatgccagggacatttcagagggggacattgagccagagaggaggggtggtgtccccagatcacacagagggcagtggtgggacagctcagggtaagcagctcatagtggggggcccaggttcggtgccggtactgcagccaggctgtggagccgcgggcctccttcctgcggtgggccgtggggctgactccctctccctttctcctcaaagaaggaggacccctcagccgtgcctgtgttctctgtggactatggggagctggatttccagtggcgagagaagaccccggagccccccgtgccctgtgtccctgagcagacggagtatgccaccattgtctttcctagcggaatgggcacctcatcccccgcccgcaggggctcagctgacggccctcggagtgcccagccactgaggcctgaggatggacactgctcttggcccctctgaccggcttccttggccaccagtgttctgcagaccctccaccatgagcccgggtcagcgcatttcctcaggagaagcaggcagggtgcaggccattgcaggccgtccaggggctgagctgcctgggggcgaccggggctccagcctgcacctgcaccaggcacagccccaccacaggactcatgtctcaatgcccacagtgagcccaggcagcaggtgtcaccgtcccctacagggagggccagatgcagtcactgcttcaggtcctgccagcacagagctgcctgcgtccagctccctgaatctctgctgctgctgctgctgctgctgctgctgcctgcggcccggggctgaaggcgccgtggccctgcctgacgccccggagcctcctgcctgaacttgggggctggttggagatggccttggagcagccaaggtgcccctggcagtggcatcccgaaacgccctggacgcagggcccaagactgggcacaggagtgggaggtacatggggctggggactccccaggagttatctgctccctgcaggcctagagaagtttcagggaaggtcagaagagctcctggctgtggtgggcagggcaggaaacccctccacctttacacatgcccaggcagcacctcaggccctttgtggggcagggaagctgaggcagtaagcgggcaggcagagctggaggcctttcaggcccagccagcactctggcctcctgccgccgcattccaccccagcccctcacaccactcgggagagggacatcctacggtcccaaggtcaggagggcagggctggggttgactcaggcccctcccagctgtggccacctgggtgttgggagggcagaagtgcaggcacctagggccccccatgtgcccaccctgggagctctccttggaacccattcctgaaattatttaaaggggttggccgggctcccaccagggcctgggtgggaaggtacaggcgttcccccggggcctagtacccccgccgtggcctatccactcctcacatccacacactgcacccccactcctggggcagggccaccagcatccaggcggccagcaggcacctgagtggctgggacaagggatcccccttccctgtggttctattatattataattataattaaatatgagagcatgctaaggagttctgtcctgtctggtggctgtgggggcagtgggcaggagggagggaggcctccagggagggacaaggcggcagccaggctgaggctgtgtgtggagggtgctggtggctcccctggatcctggcctgagtcaggccttcccctcgctgtcccagaaacacacaggccctcctcgccctgtttgccccactcacatgtagagccctccggtgaaaaattcctccaacatcacggggctggggacaccatcttccccaagcccaggccttttaggggggtcccacggccccctggccccaggcttcctggccaggcatgggtgtccctgagtgactgtgcctgctccatagcccccgtgtccccatgcctaccagtccctccgggcaggggtggtacctggtgccagggcgtccacagcggggtgggagggctgccctgggctatgagggacacagcatctgcgggtccctccctaagtacacagggtgggggcagcgggggaggcggggtcacgtctgctggagccctatcaccctgctgcggtccttggcagctagcagcagggacggtgcagggaaaggagccctgccaggccc

SEQ ID NO: 631 - protein, 140 aa, Homo sapiens
MAGWNAYIDNLMADGTCQDAAIVGYKDSPSVWAAVPGKTFVNITPAEVGVLVGKDRSSFYVNGLTLGGQKCSVIRDSLLQDGEFSMDLRTKSTGGAPTFNVTVTKTDKTLVLLMGKEGVHGGLINKKCYEMASHLRRSQY

SEQ ID NO: 632 - DNA, 423 bp, Homo sapiens
  source 1..423: mol_type = genomic DNA
atggccgggtggaacgcctacatcgacaacctcatggcggacgggacctgtcaggacgcggccatcgtgggctacaaggactcgccctccgtctgggccgccgtccccgggaaaacgttcgtcaacatcacgccagctgaggtgggtgtcctggttggcaaagaccggtcaagtttttacgtgaatgggctgacacttgggggccagaaatgttcggtgatccgggactcactgctgcaggatggggaatttagcatggatcttcgtaccaagagcaccggtggggcccccaccttcaatgtcactgtcaccaagactgacaagacgctagtcctgctgatgggcaaagaaggtgtccacggtggtttgatcaacaagaaatgttatgaaatggcctcccaccttcggcgttcccagtactga

SEQ ID NO: 633 - DNA, 4610 bp, Homo sapiens
  source 1..4610: mol_type = genomic DNA
ggaggcggtttcaccgcggccgccgcacggccgtcccgcccgtcccgccctccccaggtggctgtgagcgcacatctgactgcgaagaaacccaaagggcccgaagtgggactttccccttcttgaaaaagttgccactcttgcaacttgagtattcttccgcctcgaaaaatagccccgcctgttaagccccgcgggtgtccgcgctctgtgacctctgcagacacaggccaaggggcacggccggtgatccagacattgcctgcctggggcgggcggggctgggatgtggggtgaggccctgggctagagccgatccagagaagggacaatcctctagactgagaatgggccctggtgaacccaacctgcacgacccgagaagacgctggggacagaagtggccccggtgggtgccttcagctatgagagcgactagaggatttggccaaactcttctttgctttcttattacttgaataagtaaaatcaagggtggtgaggcggcagcgcgcacggcttcgcccccgccccttccgccaggcgggagacacgtccccagcccgccttcctttcccgcagggtccacacgggtcgggccgggcgcgctcccgtgcagccggctccggccccgaccgccccatgcactcccggccccggcgcaggcgcaggcgcgggcacacgcgccgccgcccgccggtccttcccttcggcggaggtgggggaaggaggagtcatcccgtttaaccctgggctccccgaactctccttaatttgctaaatttgcagcttgctaattcctcctgctttctccttccttccttcttctggctcactccctgccccgataccaaagtctggtttatattcagtgcaaattggagcaaaccctacccttcacctctctcccgccaccccccatccttctgcattgctttccatcgaactctgcaaattttgcaatagggggagggatttttaaaattgcatttgcaaagttcggtgtctgggctggcgagtgggggagggagggaatggggagtaggccccgcccctaccgtcctttgcaaataaaaatctagcggggcggggggggggaggagcaggaagtggcggtgcgagggctgctgcacagcgagcggagccgcggtccggacggcagcgcgtgccccgagctctccgcctccccccgcccgccagccgaggcagctcgagcccagtccgcggccccagcagcagcgccgagagcagccccagtagcagcgccatggccgggtggaacgcctacatcgacaacctcatggcggacgggacctgtcaggacgcggccatcgtgggctacaaggactcgccctccgtctgggccgccgtccccgggaaaacgttcgtcaacatcacggtactgcgaggcctgcgcggtccggggcactgctccggtttggaccctgagggagggacttgggtgggggcgggcgcggtctagggcgcgcagcgagaggccctgactgggtgcttgccctggaagcggcgcgaatggcggctgcacgtgagtgggtccctcagttgcccgtaggtcctatgccccaggcggcggcgcccatcccgcccgctaccccgctttccgcgacggggcgttacatccggggcacagggcggggaggggcgcggcgcccggtgcggcggcccacttccgcctctcccagggcggggcggggacgcgcctcagtttttactggggattgggattgagaggggacccggggatccttggacccccagctccccgtccggctgccagcccgcgtccctctaccattgtttctcctggtgcggaagggagccccaggcgcgtggtcttggtcccttgcccaccctctgtgggcttctggcccctcctaactccgttagagagggcgaggccaccacacgcccccccagctcagcacgttggattcaacattcctgcgaggccaatcccggaagtcccctcgccctcccttcccgccatccggcggggcctggagcaggggaactttgtgagaagttctgagacagcataagcgaaagtatattggtttactaccgctgctcccaccaccatctccctgtccacactgcccggaagtggggagggggagcggaagttcaaaaggggggggaagggggtttccgggcgggaggggaccggatgtgggggcttggggtgaaagggggaggggggaaaggttcccggggtacctagacccgagagctggcctgccgggtctggcccctgtccaccttcaaaagttttccaactttcccggaaagcccccaggggtctgcttcctcatctcagagcagagatacctggagctaaactctaggttacttggagacccaggcgtccgggccctaacagctcctgcagaacctttgaccaaataagggcaaagttgcttctcttgcctcgcccgcccccctcccttcccctctccgcttctgcttttcctgaaggagagttctgagcatccaaaggctcctcacttacctcactgactccctttatttcctgggtttactttccccattaacactgacatctaaatctctagaggagtatgtcatcccttcctccctggttccatattctaagtttcagaatcatgatctttttctgcactaacgtcccacagtcctcagagtttctcacagttcattgatgtgtactgagtatataatttatacttagcccccacggcggggtggttctcagaagtggaagacaggtgggtctttggagaacacggtgggaatcttggtgcactgactaacttgatgggcgcttggttcctcttccagccagctgaggtgggtgtcctggttggcaaagaccggtcaagtttttacgtgaatgggctgacacttgggggccagaaatgttcggtgatccgggactcactgctgcaggatggggaatttagcatggatcttcgtaccaagagcaccggtggggcccccaccttcaatgtcactgtcaccaagactgacaagagtgagttcctgagtcttacccttcctttagctccaagatctctaatgtaccgccttctggtaatcttgagggtgcttttttgtgtgattccccaacatgaagggagtcagaccagtattgtgttccttgtctgctggatgctggaacacgggatagtccctccattctgtctcagttcctcatcttgtaattcgaagttgctgaactgcattacctcttaaattacttactgccttgagctcggattagaaactgttttctaggagtataggtagattgttggggtcttgaatcatcgagttcatcgtttgagttcttttgttagaacctggaggtggcatgcacatccacagccctttctagcctgaacacatgaatcaacagtctatgagcctttgacccctaagtttttagtctgttcctctccagcgtttaagcttgattttcctcttttgaaaagccttattgtttcagggtgactgacagcctgcctgtgtgtggtgggggggcgggttgggagagatgaggttgggttacagcccccagggctggacagctgctgaacagctggcagggggtggaattgtgacacctggatcctagcctcctttctctttcctcctcctccagcgctagtcctgctgatgggcaaagaaggtgtccacggtggtttgatcaacaagaaatgttatgaaatggcctcccaccttcggcgttcccagtactgacctcgtctgtcccttccccttcaccgctccccacagctttgcacccctttcctccccatacacacacaaaccattttattttttgggccattaccccataccccttattgctgccaaaaccacatgggctgggggccagggctggatggacagacacctccccctacccatatccctcccgtgtgtggttggaaaacttttgttttttggggttttttttttctgaataaaaaagattctactaacaaggtgctgtgtgatttgagcttgggtgtcagaatgggggataggcactgtgacttgcctcctttatcgtggcttgggagcagggaggttgaggtactacaaggtgcaggaatttgagcttctggccaggtggccctgcccctccacagtggcatttccaggcctaagtcctcagtgtgctggtcaaattggtggatgatggaatagagccatctggaccagagaatgggtgcaggcctgcaggcaaggcagggctagttgagtcatccttgtgggtggggctcccccttctgagtcatagcaaatgccggctggggctgtccccatgactataggttagtgtctctcagcattcccttgctccttatggctaaaggggtgattccaccaaagggttaagttcacctgtgtgagaatgatcttacccttccttagtccacaaagaaacaattttattagcccaagaagtgaagacccagtccctctgcttgccccagctccaccccaaagcccctcaaaaggataggtgtgggtaagggagaagcttgggatggaatgtcccctatccctcagaagactggagggaagacgacggtctgtgc

SEQ ID NO: 634 - protein, 789 aa, Homo sapiens
MKMDMEDADMTLWTEAEFEEKCTYIVNDHPWDSGADGGTSVQAEASLPRNLLFKYATNSEEVIGVMSKEYIPKGTRFGPLIGEIYTNDTVPKNANRKYFWRIYSRGELHHFIDGFNEEKSNWMRYVNPAHSPREQNLAACQNGMNIYFYTIKPIPANQELLVWYCRDFAERLHYPYPGELTMMNLTQTQSSLKQPSTEKNELCPKNVPKREYSVKEILKLDSNPSKGKDLYRSNISPLTSEKDLDDFRRRGSPEMPFYPRVVYPIRAPLPEDFLKASLAYGIERPTYITRSPIPSSTTPSPSARSSPDQSLKSSSPHSSPGNTVSPVGPGSQEHRDSYAYLNASYGTEGLGSYPGYAPLPHLPPAFIPSYNAHYPKFLLPPYGMNCNGLSAVSSMNGINNFGLFPRLCPVYSNLLGGGSLPHPMLNPTSLPSSLPSDGARRLLQPEHPREVLVPAPHSAFSFTGAAASMKDKACSPTSGSPTAGTAATAEHVVQPKATSAAMAAPSSDEAMNLIKNKRNMTGYKTLPYPLKKQNGKIKYECNVCAKTFGQLSNLKVHLRVHSGERPFKCQTCNKGFTQLAHLQKHYLVHTGEKPHECQVCHKRFSSTSNLKTHLRLHSGEKPYQCKVCPAKFTQFVHLKLHKRLHTRERPHKCSQCHKNYIHLCSLKVHLKGNCAAAPAPGLPLEDLTRINEEIEKFDISDNADRLEDVEDDISVISVVEKEILAVVRKEKEETGLKVSLQRNMGNGLLSSGCSLYESSDLPLMKLPPSNPLPLVPVKVKQETVEPMDP

SEQ ID NO: 635 - DNA, 2370 bp, Homo sapiens
  source 1..2370: mol_type = genomic DNA
atgaaaatggacatggaggatgcggatatgactctgtggacagaggctgagtttgaagagaagtgtacatacattgtgaacgaccacccctgggattctggtgctgatggcggtacttcggttcaggcggaggcatccttaccaaggaatctgcttttcaagtatgccaccaacagtgaagaggttattggagtgatgagtaaagaatacataccaaagggcacacgttttggacccctaataggtgaaatctacaccaatgacacagttcctaagaacgccaacaggaaatatttttggaggatctattccagaggggagcttcaccacttcattgacggctttaatgaagagaaaagcaactggatgcgctatgtgaatccagcacactctccccgggagcaaaacctggctgcgtgtcagaacgggatgaacatctacttctacaccattaagcccatccctgccaaccaggaacttcttgtgtggtattgtcgggactttgcagaaaggcttcactacccttatcccggagagctgacaatgatgaatctcacacaaacacagagcagtctaaagcaaccgagcactgagaaaaatgaactctgcccaaagaatgtcccaaagagagagtacagcgtgaaagaaatcctaaaattggactccaacccctccaaaggaaaggacctctaccgttctaacatttcacccctcacatcagaaaaggacctcgatgactttagaagacgtgggagccccgaaatgcccttctaccctcgggtcgtttaccccatccgggcccctctgccagaagactttttgaaagcttccctggcctacgggatcgagagacccacgtacatcactcgctcccccattccatcctccaccactccaagcccctctgcaagaagcagccccgaccaaagcctcaagagctccagccctcacagcagccctgggaatacggtgtcccctgtgggccccggctctcaagagcaccgggactcctacgcttacttgaacgcgtcctacggcacggaaggtttgggctcctaccctggctacgcacccctgccccacctcccgccagctttcatcccctcgtacaacgctcactaccccaagttcctcttgcccccctacggcatgaattgtaatggcctgagcgctgtgagcagcatgaatggcatcaacaactttggcctcttcccgaggctgtgccctgtctacagcaatctcctcggtgggggcagcctgccccaccccatgctcaaccccacttctctcccgagctcgctgccctcagatggagcccggaggttgctccagccggagcatcccagggaggtgcttgtcccggcgccccacagtgccttctcctttaccggggccgccgccagcatgaaggacaaggcctgtagccccacaagcgggtctcccacggcgggaacagccgccacggcagaacatgtggtgcagcccaaagctacctcagcagcgatggcagcccccagcagcgacgaagccatgaatctcattaaaaacaaaagaaacatgaccggctacaagacccttccctacccgctgaagaagcagaacggcaagatcaagtacgaatgcaacgtttgcgccaagactttcggccagctctccaatctgaaggtccacctgagagtgcacagtggagaacggcctttcaaatgtcagacttgcaacaagggctttactcagctcgcccacctgcagaaacactacctggtacacacgggagaaaagccacatgaatgccaggtctgccacaagagatttagcagcaccagcaatctcaagacccacctgcgactccattctggagagaaaccataccaatgcaaggtgtgccctgccaagttcacccagtttgtgcacctgaaactgcacaagcgtctgcacacccgggagcggccccacaagtgctcccagtgccacaagaactacatccatctctgtagcctcaaggttcacctgaaagggaactgcgctgcggccccggcgcctgggctgcccttggaagatctgacccgaatcaatgaagaaatcgagaagtttgacatcagtgacaatgctgaccggctcgaggacgtggaggatgacatcagtgtgatctctgtagtggagaaggaaattctggccgtggtcagaaaagagaaagaagaaactggcctgaaagtgtctttgcaaagaaacatggggaatggactcctctcctcagggtgcagcctttatgagtcatcagatctacccctcatgaagttgcctcccagcaacccactacctctggtacctgtaaaggtcaaacaagaaacagttgaaccaatggatccttaa

SEQ ID NO: 636 - DNA, 32707 bp, Homo sapiens
  source 1..32707: mol_type = genomic DNA
gagctttgctttctaggcgtgtgtctccagatgggcccaggaaagatagggcctcagttctctctggtttgtttgctggggagggagttagagctgtaagcctccttcctccaaaaggatggttggagggagtccgaaacctttgggtcccaagacatgacctaaggagtcccgctgtcgccactcttcccggtttggtagagggggcccgtgagtggcatttagctctcgcaaaactgggcagatagacgcacatgtcgaccctccttttacaatatttcaaaataattctgcattgtttctctactggaatcgttaattatgcataactcagtatcttaatttaaaggaactgaagtcctaactttgggttaggttctcttacaaagacttcagggatgtttagctggcatctcgggtttgatccccaaaatccaccacgaaacaaaagctagctttcctaaactcagtaacaataggagaactggtttaagccacctctgggtaggcaacccccacccctaaagccctccttactccaacctgcccctaggtatgtttgtgtaatcagagactgattgtagctgctttgacgtttctcctcgggaaagcttagtttgcattcattgaagttgcttgctttctaggttcatctaggccagcagggaaggtgccacttggaagattgctgggtttcctgcttcgaagtcttcaggagcgggctgagctgcgctggtgtgccgcttaggactgcaatgaggagggtgacgttagaaggtctttaaaacgttacgtttactattttaggaaacagattttcaaagaatcaagggtaggggacaaaatacatttgggctaggattttagtgaagagggatcacgcccagaatgagggatagtaaaagagtggtggtatggggctctgatatcgcttaatctgtaatctccggcagtgttgatagctctcctctggcattaattcttcagtcttttaaaacggagtagaaagggacgttggattgatcattacggtttgtttggagaatagaatttcgtgtcaccaacttggaagggtaaatgaattgcagagtcggatacagctaatttgggggaatgtaagctggatgtcttttcctaatttatgaaacgtgaacgggggtaaggtatttatttgtacgctagttgaagtggggcaggagcactgattcctggacagtcactcaaaagctgcgcccaaagttttaaaaagcgcggggacggtggagagggaggcgaagagcccgcgctgctgggctgggctcgggtgccgcgctggggacgccgcatctactgagcggtcgccgaagacgccgggaggcgaggggcgaggtaagacgccgcctaaagaggcccgggctctcccccggggtcgttgttggaaaagcaaattccacggtgaactctaccaagctcagcgcgtacacagctagcggctctggattggactgcattcgcctaaattgcgtaattaaaaaaaaaaaatacaccactgccaccctacagcgacgcttccgctggaagacgagcggggacgcgtgacagcgcggggatagcttttctattacgtttcttgttctccgagctcgagcccccttttaaaaagtcgctcaccaaaaacggggtgggggatggaggtggggacgagaagtttccgaatgctgagttcatttggacgaggtgaggagaactagggtcctaacagcaggtccagaggactctcgagataggtttagagcccgtccttttgtctggagtgtcgcgggactccagaagtgggttgtgcaagacaaacttccagataaatctttgcccggatcctcctgcggtcaaagcatcagtcctgcccgtaacttcctaacgacatcttcttggagcagattccgcggcggggatggctgggtgtgcaaaccgaaaacagtttgtcagccctccagtcccgccgcgtcgggaatgcgagcccggccacgcggtccgaccgggtccggggacggcgcgcttgtcgcgggagcctcccggcttgcggagggcttgagttttttggcggagacagaggaaagcctctggtcgagaggattagagcgcgcgttttctccgccgagcacgctgcccgacgccgtcgcagccgcgcacttcccggttttgaaagccagagagatgagtcaagcgcaaaagctccggagtgacaatgcgagcttttggccagcctcatcctcctccccattcccttgccttcttttaggtcttcggttcgtgacaagtgcataggttaggcttgcacggaagagggtcggggcaggtgccagctcagggcacctacccggcgttgtcacgttccctttgggatcaatgatctttcataactaggctgggcatgttcgtgcagccctctgggcactctgggggacgttctcataaggctttttttcttttcttttctaccttttaacagaaccttctaggaaaagtgttttttaaagttttaaatatactgatgtctacagaaacggataacaaaatttcaaagcggaagggaggaaacaaaaggaaaaggtgttttacttggcagtcattgctgaagctaccatagtgtaggatagaggaagagcgtttcagaagagaattggttaagtaaaaccttcagctgtaacgtaatagaaaagacacagtaaatgggaaaaataataaaatgtacactagatacattacacagacgattgagaacttatgctcccactgaaagcctctttctcccagggagaatatttatggaggaaaattatttagttattttcacagtattacattgtcctttgaatgaaagttttttttttttaatcagtcagctagacttggttctttaattaggaggcacaatgaagtttctaacagatgttgtcagccacaaactctgatccaaaataataagtgtaactaattttcggggacaatctttagtttgtaaggcctgaaattaaaatacgatgcttttaaacactgtggttcaaaaatgtaggaaaacatttgttccagatcttatagtggcaccatttccttgctctgtgttggaaaagccttaagtaggatatgacccttctctctcactccaaaacctcttttttcaaacttgatttctttctgatcttagaaattctactttaaaaatatttcctgatttttaaaagtcagccagatgaggtgaaatccttaaaatataacatattcctgatcagatcacataacttttctcataaactaagtcttataaagaatatgcttaagcaactcttcatctaaatatagctttcaaatatgtataatttaatctgaatcggtgttgtcaaacttccagtaccctgaaatataagcacaaagatcaaattatctataattgtcagataaatgtggtagccactggttctgcttggtgtagtaaaaattaattaacaattaatcatttttaaattgaatatacaatgttaagacaaaatattgagtgggatgctctaatatatccagttcttaattcttggcatggcatcatgacttctaaactctatatggtgtgttgaagatttgaagatttgtcattgtaagttacctgtttcctacacattggaaagagggggaagttaatacgttttctatagcattcaactcctctgctgccaaaacatcttatagtttggactgcattttaatatatgccatattttgaaatctatttggttttgaacaagctgcagcctctgtgcaaataacctgtcatcctttagtggatctttatggctattttaaataaaagtttttttaaagtgccaagagagaacattacaaagtgaggtctgtcttcttgggattctatatctatttgagggtgaagggtagatagggctgatgttacatcttttgacagagggctagtagaatcctatgtttctgacacaaattaaatgtgatttccgccaaattgactgtctcctggcgtggaggcacatcaccacgattttggtttgccacattgaaataaataagaaaacaaaggctggacttgcaaaagctactacttatttttcagcttctttaatgactaggattctttcacttatctgccctggactacacactgacaggctgctggaattctgagcagtaaaaaaattctagatggccaatataatttaaatgacaaatgtgtattgagcacatactgtaaggacaggggtaaaaagtggaagaccagtaactcagccgtccaaatgaatgggccttaccaataagcctaagacactgggatggggctgcaacttcttttcatagcagtttcataaggctttcttttcttttctaccttttaatagaatctctgttgaatgatttttttttatattgtgctaagtagtttttcctagctgtctcaattgttctagagcttcttcgtgtgtcatggaaggcctgaaagtctgggccaggattataattgttaaaaaaatcatttttctcagttcgttctctctttttaaatactaggatatttgcttcgttaatagtagaattttagtcctttctttaaaaaaattgtttgtttgttcttcattaacattaatgacatttctcaactgcatttgcttcagtctcatttgggaatctgcctagtcttgtctccttaacgggttagcggtgatgacaccttagtaccagaggttccctgagttttgctgtcaactcacttatatgccttttttaagggaagtaggttggaggggttaccctcataaagctcgtattctccatatttgtaaaagggattttgaaacatttctttacccattggaaattataaaatcatcggaggcattacaaagtagcagaaaatgctggaaaacaaaagaagagatctatggactttgtaatgggcatttggatgagagcttctagattatggtctgaaaaaaggaactatactttctatttcagtagtattttattgttcaatagtgaagttttaaatatgatggtttcttgcccttcaaaaatgtaccttaatactgtatgctcaagcagaattaaaaagtaaactggttgagtttagaaatattctattagaaaactgtgtatgtttagttggtttctattttatgttaaacaaagtgcagggagtttgaataaatgaattttaagtatttttattacaaatttaatttacttctggttgtggtttttttaagtttgctcttatagataaacattgctgcctttcacagcatttcacatttgaaatatctgtatattgtgttctgggtccatcgagctgaaagcttgtggcaaaatattaacgttttttcaatttcttaattgaaaggatactttaagctgtgagaagtggcacgtgtctgtagtcccagctacttgggaggctgaagcaggaggattgtttgagcctaggagttcaaagccagcctggacaacatagcgagaccccatctcctaaaaaaaagggaatactttaaatataagacatacttgaaaaaactttttagaacattttacatttgacatttctgtctctaacataaattaatatataaggtgcaacgttttgcttgataggaagtttatactgtaaataaacccataagtcaaatgaatatacttggtttctttctatacacatgacagttaattttactttatttagatttttgcttctcctaggattaccagtttcaaaaagttttttcttcagtcagacttcgggaagctagtccacctaatttaaaataaaatgacatgaattcccagtatttcatttgttcatttcacatcttttctttgtctgcccaaggactgttagtcaactttcatcaaaagaaaactatttttaccatttatagttctgcctctgccaggctggtaatatccatcttcccttactgggttactataatcaacctggctattgttttgcattgggatttttaaaagttaatacatatatatatatatatatatatatatatatatatatatatatatttttttttttttttttcttttgagacaagatctcactctgtcactcaggttggagttcaatggcataatctcggtttattgcagcctcaacctcctaggctcaagcaatcctcccacctcagcctcccaagtagctgggaccacaggcatgtgccaccatacccagctaattttgtttaatttttatagagatgggagctcactatgttgcccaggttggtctcaaactcctgggctcaagtgatccttttgtcttggcttcccaaagtgctggtaatacaggcatgagccaccacgcccagcccaaatatgttttttcataaaatttagaaaacagggggttgggcagcagtggctcacacttgtaattccagcactttgggaggcaaggtgggaggatcacttgaggccaggagtttgagaccagcctgggcaatatagcaagacccccatgtctacaaaaaaaaaaaattagaaaacacattgtgaccaattagaacaaaatttgtatacaaaagtgacatgttttttgctttttttgttgttgttgttcagccaggggcactcctcctgtggactttgattatgtgtgttgccactgctgtgttacttgccttacactaagtcctctcagactcaagtgtcatcgtgatgggctcaggtgtacctaagctaccttccaattccatgccctccttgcactggctcaggaccatgactgcagtagaaataaacttagacctagtgtttaccaacaagctcatgtaacctttggcgtgcagggcctcaatttctttatgggttaaatataagttattgagattaaatgatatttgcaaaaatatccaacttaaatccaagaatttcagagtattttaagttatttttaaagggcaaagtatgtgaccttcctttatctatgtgtttctttttttttgagacggagtcttgctctgtcgcccaggctggagtgcagtggcgccatctcggctcactgcaagctccgcctcctgggttcacgccattctcctcagcctcccaagtagctgggactacaggcgcctgccaccacgcctggctaattttttatatttttaatagagatgaggtttcaccgtgttagccaggatggtctcgatctcctgagctcgtgatctgcccgccttggcctcccaaagtgctgggattacaggcgtgagccaccgcgcctggcattatctatgtatttcaactataccaaaaaactatagagaatattataaaccaacacctatctccaatatacttatttctgtgtacctatctccaagacatttcaaagctatctttaactcatctttaaaaaatatatacaagccaggggcagtggtgcacacctgtagtcccagctactctcaaggctgaggcagaggctgaggtaggaggatcgcttgaagccagaggttcaaggctgctgtgagctatgatagtgcctttggatagccacttcactccagcctgggcaacacagtgagactccatctttaaaaaataaaataaaaaattaaaatacgtacatttttaaatgttaaagcctcctatatactctttccatctcttttccctccctccctccctcaccaaggttatttccatgtatgttttccatgtatgtaatttccatgtatgtacagacttttatatttgtatgtatagtaatgtttgtcttattaaagaaagctgacataaatagtatcatcatacacgtgttctttttaactaagcattatgtttttctgagatatattcatactgatatatgttgctttgtttcattccattatcagtactgtagaagttaatggacatgccattattaatttatctattttataatgttcactatttcaaatgaggctgttgtgaacttctcatacatatctccctgtacacaggtataattgtctttctaggataccacatagaaatggaattgtggggtcacaggatatgaatattatcaactttgataaatatcactaaattgattttcagagtggttgcattaatttacaccgatactattatagcttcatgtgagtgttccttttgcaagtatattgtcaccaacactttgataaggtctgacattcaaatacttttccacttcagctggatctaagatggtgactcatttttaaattatgttttcctgacctagtgaaattgagcatcttttcactgttggacacctggttttcctctgctgtgaattgcttgttcttatcctttgctcattttttatttggggagatttgttttcattaataatttattattctgtgtctagtgtggattctaattccttactggtatgtttgctgtaaaaatattttcctaaatctttggtttagccttgcgttgtttatggtgtcttaaaaatgcagaatgtttttaatacaatgaaatgtattcatcttgtagagtttatcgttttgtcttttaagaaattctcatctaaaagttatagatatagttacccatatattcttctaaaagcttcataaaattttgttgagtctttaacttacctaaaatgtattgttgttgttatgagatagaaagctgttttactctaccaagtggataactaagtatccaggcaccttttgttaagtagcccatcctttccttgcacttttaaaatgccatctctatcatgtatcagttttatgtatacttgtgtatgtctcttttcttgtcattggtctatttgtatttgttccactatccctgttccattacactggagaacattgctgtatgtcttgatatctgatagagtgagttcccaattgtgtttttcaaaattgtcttggttattcttggtgttttgctctcctgtatggattgtagggtcagtagatatactttttaaaaagtgggaaaacattataaaaagtatttttgagctaatatccacaataactttttgtagatctgaaactggaaatatttaatggtttctctatttaattgttggatcttcactgaaatgcagtatgtggttgataccaaactaatttgaaacctgctgttgaatttggctgtcctgaatttcagtgcatgaacaaagttggagaagtttagattaaaaaaaaaaattggagcttgactaagctgaagtgttgggttgcaaaaaaaaaatgagattttttgttttcttaagtagcatttgaattgagatgtagaggtaaggccaggtaatcgctttcttttctccttttgtcattaagcagaggtagaacaatgggtgttacttgagagctgcccttctaacccttgctgctcttaaaatgccttcaggtcatcacaaggttcttagtggtgttttaattttttaatttaatgtttaacttctgagagaattgcttataaacatttactttgttgatgttgctgggacatggttagataatggtggctatgggtgatgataagggatttcatagtatgtttattttggggagcgattaaaaggattgtcatagttttatttaattggaaatttattttggattctttcgtccttaaggcatctaatattagaaatgaattttaatgttaaaatgtacaaagatatctaactcttaaggtttttaaaatgtattctgctttatacaaacttagaaaatattttttattatcctcatcaaatgtgacttgacatcatagttgttttataaatattttgagatttattttcttacttattgtctttgcccactagaagaaaaaatgatatttgaggcattctattcattccgtgttataacttatcaaggattggccctagatactctgtgtttacctatagagagtgtggttgctcgttcaaggtcctgatttttctcaatttttcatccttttctgttctgagcttcacttgaccagcttcctcaactgtgtgtggccaagagaggaggaatagagttggccattctcttttggagcattcagcaggattacatgttatggaatttaggaatttttactttattataatgcaatgttattagtttgtgattatttttgttctttttcttttttgtaagttgatttattccaagttaagaaagaccaagatatacctagtcagagaatacctttacagacatacataggaacagagatttggaatttaagataattgctcattgattcattcactcatcatacataagcatgcatattatgaataaagtgtcagtataatgtattgtccaaagcaggacacttttgagactgaaagggggcattagggacaattataccaggactataaacacaaatcaggatcttccctggcaggtcatcagatactgactactgtgtgtcatgcttcatacattcaggacattttaaataatttagttaaccctcagggtgggaaaggaagggaaagagttgattagaaaggagaggcttcactcacagactgcaggtttattgggtgctaagtgtgccctgctgtagtctgttagtttcatttcattggcatactgtaccttgcttccttactatctatccttagacattttaaaaaattatctttagcttctgcattacttttatttggggctggtaacatacttctggcccttgtctttgttactatttttcttactttatagttggattagttggattttcagaccattctctaggcaaaattggttagctgtttcttttgaccacttaggaagaaggcctcctagtaatgcatgtgctttttattcctgtctgattgctccaatcaaacgttttgtaggtggtttatctggaatataaagaatctgaaaggagcacagactttcaccccaggtccagatcttacttatttttggacatgagtgtactcggttctcaaggcagaacagctttgtgtgcctgtattccagtattgttgctttaattgcagtttgcttccttctccaaagggagagtgagtggtgaatcagtggaggagtgacagatggaggaaggggtcacctttccttgtgtaggtatatggactgtttggcaaagagtcattttgtttttgtgggtaatgctctcccccacttttctgaaatctatatctgagagtacaaaatatgggagtgtgtgtttgctgataatcagatcaaaggttcccagggggctaacctacctgaaaagggaaaggggctattgtggctctctgcagcctgacctctccactctcttattgtaacaaagtttttgataggcatctagatagaaagctgctggggggaacttcccaggtgcttctgagatggaatgtgtgcatctatccatggatacgataaatgtgagctattgagggtagaaaaaaaacagtaacatatatgctaacatgaatattgaaacagattgttaatctttcatcagagcttcttggtttagaaaccttttatttggcaataatgaatgtaactattgactaatattgtttaagagactgctatttgtggcaccaaagataagcataacctgagtgacttcttgaccctttgcaaatatttacaggctgaaataatatagtttgacaaaagagccaagtgattttggagtggcttattttctggttttcctacagttcagaagataatttatctgataaaaatggtaagttttgcttgtggaggtgtaatggattttgaaacacaaaatatggattaattttttttgaggcgggatagtaatggtgataacggtatgtatgacacatgctgttatgaatatattaaaaagcattttaacatgttagagtcatcaaaagttatgcccacttccattttatacattttggcatttcttgattaaaaatatattgtcaacataaaactaccatttcttggaatagatgcttgttaaaaatgtatccttatcagtttatcaaaaacaattgttaaaaatgatatatttgtggaaaggggaaaaactttccaaaataaatatttttatggaaacaatgaactctttgctagatttcctcttctagtacatgattcttctaataatgtaatacatttacaacaggtctgatacctttaattctccagttctttcacacagttaagtgcttgctgcaatcttcttaaggctgaaagaatgacacattcaagaagtctttgacagtgtttaaacacctcttatcaaaacttaatttccatgaatgattgattttggcacttgatggaaggctgaagaatgttcaattaccccattttcatgtgctaatgaagccgaaagtgacttaagaggatttctttacactgtggcagcctgtttggatatgcacatgacttcttaggtttctctcccagggtttgtctctactaaatagttgtcttattgagtaactgtagctaatctgtctgcttggccacaggccttggccttcctctgtagagtggactgtaattagtgaagctgtcaaccaggtgtttaatttcaagagaacttattttgttcaaatcttccaataacttgccaaatcaatcaggtttagattttctgtttgttcacgagcactccttgaattttgagtaaaatgaatatggaaaaccttttaaactaggaaaaaatgcaactttcaattcgaaactttgggtttataaagcttgactatgagtttcaatttttcacacattgcgctagaattatcattaaaacacttaacctaagcttggctggaaatatacgtatcaaattgaagaatttcctgccctgttttttgacaagggatggctgaatgaggaagaagaaaaattatactgtaggaaaatacataagactctccccactaaaatacatgcagttcatgggtttaaattttgatgattctgcttcatgttcttgcataattttagtgttagaaatgagaaaactttacggttagatatccttcagccttgtgatccctttcagtttataatcctgtggatccagaaaggttatttctccagcatcagaagacatctgaggcttgcagtaaagtcacagactggttttgtgactctagatgaggcacttctagccttttcagttcaaaacaacgatagtcctcatccaaactgctccttactttctcacagcctccacttccttctcacgaaggtgtccgattcctctgagcatggaaagtgctgtattctggggacagcaggaacttgtttagattgaggcaaacatgctgcgtgtaaacacttaatgcgtgtgttctagcagactcagccaagactgatggatgacttcttttttctttttcctcccttatatggatggtaggactgacttctccagataacaactgagttgttgattagtgacttttggtataaactttactttcgtagtaaggaggaaaatatgtcaaggaaagaagcagctctgtttcctccacagacccctatctaatgagcttgcaattatgagaatttaatacattagtctcgtggggtgaacctaaactctacattgaagcttgagattctcaacatcatttaacatcagatagcattttatcgtctccctttgtatgtagaagatactttctcttttcctctaccctcccaggagttatctccacctcatctcctcaccaaaaatagataaaaataaaaagagggaagaaaataagacctttgccagataccatcaaagtatcctcagggtttgggtggtacacataacgaagaaattacttccttctttccagttttttgaggtgaaggcagtgtcctggctggtccatgctccactcaggcatggtgctgtagtgggaaaagaatattgaactggaaggcagccatgttcctcatggcttctctactttgacaacagagcaaagttatctcatcaccctggggctgggggtatcacagtaagcttaaaaatgtctaaggtctcttcaaactctctgctcagtgatcgtttatggcacttgtgtgtaatttggaaggtgtactaagacatggcaacacactgcactcaaagtcatgcttattatctgcagcatccccattgtatttcattggggcttggtcactatcacatctgacttgatttctcttccttctgagtgatttctctctcatttttcttagtttgcttccttaccattctacatgttctttaggagttggtgaacccaaaattatttgagacaggccaggcacagtggctcacacctgtaatcccagcactttgggaggccgaggagggcggatcacgaggtcaggagttcgagacttgcctggccaacacggtgaaactccatctctactaaaaatacaaaaattagccgggtatgatggtgggtgcctgtaatcccagctactcaggaggctgaggcaggagaattgcttgaacctgggaggtggaggttgcagtgagccgagatggcgccactgcactccagcctgggtgacagagcgagatccatctcaaaaagaaaaaaaacattatttgagacaaaggcaactgtcatttttgttacaatactatttgagcagaccattcatgtgaaattatctactactgcatcttccaaattacatgcaactaaagatgggggtattgacaactcgaaagttacattcataactaatattcttggtacttttaatttttttaatttcttaagacttttaaacaaagcaggtgatatataaacttcccacattatttggactttgctctcctttacctaagagttctcctgctgtcattcgtcccttgaggttagctaacaaggtcacctgcctgcctacctattctttttgcattgcactggtagccttctttctgttttcctaaatgcatctcctaacgactttctccagctccaagctcttccatctccagtctttcctcctaaacttcttaaccagtagttggtacgccctatgaggacatgagccaggcctctcctcttccccactgcaccctgtgcattcgctcaatgtttgttccacgaaaaatgtaccgttttgatgaaatctctttttatctccagaacctctaatggctttacatcatgtgcagactaaatttcaggcatcttaatcccacattttttcaaagcattttaagaaatggtcccagtggggctgggcgcggtggctcacgcctgtaatcccaacactttgggaggctgaggtgggtggatcacgaggtcaagagatcgagaccatcctggccaatgtggtgaaactccatctctactaaaaatacaaaaatattagctgggcgtggtggcgcgcgcctgtagtcccagctactctggaggctgaggcagtagaatcacttgaactcaggaggcagaggttgcagtgagccaagatcgtgccactgtactccagcctggcgacagagtgaggctccgtctcaaaaaaaaagaaatggttccagtgtttctcacatgactcacacttgtggaaatcttctccatgtgccgagctggggtgcccctccttaaagcctttcagtacctgggcaccagatccccaccctttcacactcttttgccacaagtgtctcctttataacatttgcgaacacactgaatatttactaagtgcctggtacagaggatatagacaagataagtcaagcggctctctaggattctccttctctcccaggacaggcaggcaggaaaggagggcccagtcagaccccttctgagtgtgagagggagggtggggctctgatggtgccccttactggaagtaaaggcagagactagacactggctctttatccccgtttctccagggctttcccctgatgctttgtctaaaatagatgcttggttactggccattgcctgtactgcctttgcctttcttctcttgttggctttgtattctcctgtctccagtaactcccacctggaatgtctactccttcgactctacctctaggaatactcccctttccacaaggttcaaatcacagactatagtcttcccgcagcggtggccaggtccatggccaggcattgtctctgactcctaagaccccagcaactgaacacaggcccctcacggcagtggttatattctgccacgttctatgtctaccctttcgctcacgcccccttctgtcttagcgctcttgcctccctagaacacttgcgtagggggttgtcaggctcttggtattggttctcagcataaatttactttgacaaaagatgtttgaagcaaggaaattggacaaattccaaatgaatgaaatatatttgaagtatgtatgtgacaatcaggttaatgttactcgtgtgcttcaaagtggattcattccagttccaatttatagtgtggcaaatatttacgtggattttttaggatgactttcgcttccttttggtccggaaagctggatcaccctaggctgaaggaaaaaatgtagaaaggttttaaatttacttgggttagtagttagcattccttaggcaaacaattccccccaggattatattttcattttctcacaactctgctcatttcaaaaagttgcacatattcaaagctatagtaaaggggggaaagggtgtgcaagaaatctacctacatatatacacatggggggaaaactgtatcaaggtggaaaccataaatgaacaaattaggggtgcatgtatgagagagagccctgaaaccaaagaaggagctaactcaggacgaaagttttgagcatccaacctgagtgtgatgtgattatcttctccctcctgaattttttttttgagatggagtcttgctccattgcccaggctggagtgcagtggcatgatctcagctcactgcaacctctgcttcctgagttcaagcaattctcctgcctcagcctcttgagtagctgggattataggcatgcgccaccacgcccggctagtttttgtgtttttagtagagacagggtttcaccatgttggccaggctggtctcgaactcttaacctcaagtgatccacctgcctgggcctcccaaagtgctgggattacagacgtgagccaccatgcctggcccttcctgaatatttgagttacccctatggcaggtcaaagtcactgaagtccagcaggcactctgagagctatggggtcccaagatgtgcccagttcccctctctgcagagtatggtaagcttggcgtagggcctctacaaactaatttagcttgtgtaattaattctcacagcttgagatacccaagagtctgacaggcactcttcgacaggcgtttctaatcctttacttacttgtttatccttgcagaacccctttttcaaagaaaagcttacaatgaatcttaataaatagaatatgaataaatgatagtttaatactacaaatgcataatcatacatattttatatatttatgtttaaagcatttatttattaggaggtgaatcagctcaacttttttgactcccaaacaagaaatctatggttatggatgacagttatagccttgtatcagcccgtgcatctaattaaattctacatctttagaatttaattaagcatatacaccatgcaccttatcaaatcaatccatttcatgaacatattggccagtttgattcaattcaacttaaagctaattgaccttatcacctctatcagcaagttttctttttaaacttacttttttaaaaagttctagttttaaggtcacagaagcacccaaaactatgaagtactaaaactagaattctctgaagcatgacaccgtggagccgtattatcaccacgtgccctgtcgtgtcaggggtgcatttgttaactgcacaactcacttttggccaagaacctgcatggggcgatgacctcgagcctttcccaggatgtcactgagctcaacctgtgggtactggagatccacttagatagcttgaagtgtgtggacttgctcaggactacaggtttaaaagaccagggcaaagcaagtgtcctctcagtaatgcacatctggggatttcagctgcagccactgagtagcagcaggaccagcctgcagagtcccatttgaaagctcttgctgtggtaggccctgcaccgttaatccccatagggtgtaccttttcatcttcattgtcttctctgattgtatctttttatcttggggtagttttcttctatttgtttgttttgtttagcttttctattttaaagaattaaattacattgctatagatattaccgaagatgtaccgaagacttaaatttatcacctttataacaatcccagagctaagaagactctctgaggaacctctgttgctgatttgggcctagtctgtggaaagggcagttgaccctatactgggatttcttgatgttgactgcagctattgtaaacttattataaaaaggcacttaggtccttttgtttagtaagacttgaactcttcagtctgtctccagcctgggagaataccaggacttgcctgggtctgtccaggttgctggaggcagcctgccttcctggggtggaagcaggaagagtatgtgcgaggggagcaagccttgggagtgtgaggagcggagtacactataccctcctccctgagggcagtgcccagacaagtgggtgagaacccttcattccctcctgccttctcaccccccgccccctgcaaagctgcttactgtggtgcaaggaaaaggagttggagtccgaagtcccaggttagtggtattgccaaagcgggtggcttgggagtggttcaagctcacctcaacattcaatttaaatgaagactgtgctggtggccaagttcttactctcagtcagcctcctgcctcagtcactcacatacacacccccacacattcacacacatgccacacgcaaacacagtacacaagtaccacagcagacacacaccacaccccttcacattcacacactatacacacataccacacacaccacacctctccacattctcacacaccacactacacacacacacaaacataccacacacaccacactcctccacattcacacacaccactcatacaaacataccacacacaccacacccctccacattcacacaccacactacacacacacacaaacataccacacacaccacacccctccacattcatacacacacacacaaacataacacacacaccacacccctccacattcacacacaccacactacacacacacacaaacataccacacacaccacactcctccacattcacacacaccattcacacaaacataccacacacaccacaaccctccacattcacacacaccactcacacaaacataccacacacaccacatccctccacattcacacaccacacacacacaaacataccacacacaccacaaccctctacattacacataccacacacaaaacataccacatacacacatacacaaaaaacatactacatacacacaaacatatcacatgcatatcacacccctccacattcacacacacacacacccctccacatttacacacataccatactacacacatgcacacactggcataccagccccacacacccaacactccccacacacatcccacatcacacacaccacacatattgcatgtgttgcaaacatacaccatacattacccccctacacactcagcccactattatacttgctttgcagctggcaactccccctctcccagcacctgccccagatgtgttcaggtaaatggttttctagaacaacttcagaaaactcgggaactctgaagagcggaacctgagtgatacactctagggaaaagattacttgtttctctgtctgaaaatgcagaaaaaggtttgaaatttgttttctgctttttcagtttttaatttgtcagatggctgaacagatatgccattagatgtataagatttggcatatccttttgtgtgtgtgtgagacggtctcattctgtcgcccaggctggagtgcagtggcaccctctcagctgaagcaattctcgtgcctcagtctctccagtagctaggattacaagcgcgcgcaatcacacctggctaatttttgtattttcaatagagacggggtttcaccatgttggccaggctggtctcgaactgtcctcaatcaagccaacctcctcagcctcccaaagtgctgagattacaggtgtgagccatcatgcctggccatactcttcaacaacagatcatcaataattgcagtgcttatcatcaaccttcccaatccctctaaaacagaaattttgtacaggcatctgcctaaactgagcttatcctcattcacccctgcctgtaaactgctttttgaacttttctttttttttttttttgagacagagtctctctttgttgctcgggctggagtgcaactgcgtgatctcagctcactgcaacctccacctcccgggttcaagcgattctcatgcctcagcctcccgagtagctcggattacaggtgtgtgccacaacactcggctaatttttgtattcttagtagagacaggatttcaccatgttggccaggcttgtctcaaactcctgacctcaggtaatccacccaccttggcctcccaaagtgctgggattacaggtgcgagccaccatgcccagccgaccttttcttaaagttcctttcttcttttgagagtcattttcaccaagagccaatattgtatagtgctgccaagagttcctgaggtcccataagtaccagtagagattccgctgctgaagtggctgcttgtccgcttggctagccacactgtcctctgccctttcctcccagcctctgttcacttgctggttcttctgcatagaattcttttccccctaatcttgttcccctccctttatgggtttggtcacctcttcacagaggcttttcctgctgctcctaacaaaaggagcttcctccttcccaattcctttatcctgctttattttattcctccatagctcttgtcactgtctaaatgtatttatttgtttacttctttactgtctgtctctccaaccagaatgctaactctatgaggacaaggaatttttttttttttttttttttttgagacggggtctctgtcatccaggctggagtgcagtggtgcgatcatggctcactgcagcctctgcttcccaggctcaagccattctcctgcctcagcctcctgaatagctgggaccacaggcatgcaccaccatgccttgctaatttgttatttctttgtagagacagggtctccctgtgttgcccaggctggtctcaaacttctgggctcaagtaatccgcccgcctctgcctcccaaagcgctgggattacaggtatgagccactgctgcctgcctcaggacaaggaattcatgtgtttgccttgttcactgttgtctccagtgtctgaaacagtttctagcacataagaaatgttcaaaaaaaaaaacttgaataaaaagtattgaacaaaggacttggatgaatgcaaatgctgaaatgctcaggattttttaaaaaattgaaaccagattattttaatatatatgatctacgtttaatctataatgtaagtctaaatttaatctgtaacaaatgtatttattgtacatcaataaaacgatgatagataatagatttaatctataatattaaattaaatatactataaatttatttaatattataatacagttaatctataatcatcacatttctaaattttggatttatcctgagagatagaacacatttttttttatagaaccttaaaaggcagctgttggccttctggtgacaggtgtctttctttcttttttaaaataaccaaagctgtaaattattgtgatcaaaaatagtttgggaagatggtgagcaggggttttgctttgtcttgcttgtctttctgtgagatgggggtgaggagagagaacaagacacagggacataataagttcatagagttcaagatacagccccctgggatgcccggtgaatttccttaaatttaaaagaacacagccttgcccttgtagtctgagcagtggtcatctggaggccacccccaaccaagggttccctttgctgggatggataactcaaaggtggggaggttgcgtttcttcctttcttttacaaggtggtaatctcttagctgcctatggaaataaggctgctttgaaagaggagctttacacattgtaaacttttcccccagggcaagtcagccatccttaatgcttcttgaagttaaaatttcttttctctcttcctcctcttttctttcctttaaaaacttttttgttaatgaagtagaaaatgagcttctctgcacttgttaaaaagtgctacttgggcaaagaaaatgtctgtcccttctacaaatgtgtaaaattatcccgtttgagcttggcatttgaagatttcagactcctcaagacttaaatgaaaggcaaggtgctaaacaatgaatatgccaccttttgtatgagaaagagaaaaagagatttgctgctgtttgctaaagaaacactagaagaataaagaagaaagcagtaacaatggtctctggtggacaggtgtggatgtaaggggtgggtgggaagggcatgggtggagacaggaccgagggtgggacttctccctatttatctgtttatatcattctgatttttgaatcatgtagtgtattacctatccaaaaatgtaaaacaaacattcttaaatcccatcttattttgatctttgatacttgtctgatttgttttttccttttctttcttttttttttgcagggagtagggtgtgatttttaaaaaattgtagtaaaatatacatgacaaaagttaccattttaaccatcttcaagtatgctattcagtagcattaagtttattcccaacattgtacacactgtcaacattatctgtttctagaattttttcttcattccaaataaaagctctactgattcaacaataacttttccccttcctcagcccctggcaacttctattatactttgtttatatgaatttggctcatatatatatgtaaaatcatacaatatttggccttttgtatgtggcttatttcacttagcatagcataatgttttcaaggaacatgcatattgtagcatgtatcagaatttcattcctttatgtggttgaataatatcccattgtgtgtatggattgccacattttgtctattcattcatttgttgatagacattgggctgttgccaccttttagctattgagaaaaatgctgctatgaatcttctagtgctttcttcatattgttttatacttatgatgtataattatttacatttatctttttatttactttttaaaaatttatattatttacatttatctttccttctagcctgggaacttgacttgagagtaagggacatgtagtatgtcttattctttctcgcaccctgggtacccgcagattaacaagcaggtgttcagttggcatttaataaatgtctgtcaaatgactaaatggtagatggaaaattagttttgagtttatttcataaaggacaaaagaagatttgaaaagtttattcttgaacaagggtttgaactttgagggtccatttatgcacagattttttcttttctctctttttttttttttttttgagacaaagtctcgctctgtcacccaggctggagtgcagtggcgcaatatcggctcattgcaacctccagctcctgggttcaagcgattctcctgcctcagcccccgagtgtctgtgataacaggtgtgcgccaccatgcccatgcccagctaatttttgtatttttagtagagacggggtttcaacacgctggccacgatggtctcgaactcttgactttgtgatctgcccgccttggcctcccaaagtgccgggattacaggcatgagccaccgtgcctggccgcacagatgtttttcaagaaatacgttggaaattttttggagatttgcaataatttgaagaaactcctagatgaaccatgcagcctagaaatgttgaaaaaattaagaaaaatgcattatgaatgcataaaatatatgtagatacttgtccatttttgtgtttgttaattgactgcttatgttattggttctggtcaacaggagactattagttaagtattggggagtcaaaagttatatgcagatttttgactgcacaggagaattggtgccccaaccccctcattgctcaatggacaacttgtatttgttcagctctgtcagctttgaagaagtgatcttgtttatttggaattagttttaagttaaaacatatttagatgataggaagttgctgtagaaatgtatccattttctaaacacaacatggcagtcagaaggcaatattaatgaacacaggctaatagaaaacactcttgctctgtgtgtgtctgagtctgggtgtgtgactccattgtgaactggccttagagggtgacctgcgcacctccaccctacccttgccggagggcaccgtgttatgaataaagcaactaagtttagaaacaggcaaagggaagcagaggtggggttttgggtaagttcacacagttgcttggccagtctgaccctgggcaaatgtccccttatctctcaatgatggatgatgcagcagctttgaccaaactgaacaatccccatttcaagaccagctgcccagtttttttctttttcggaaagggaccctgaaggatgttgatttagtggcatctcctcacggttgactctgtcagtcatcaggatactgtggaagcaggggcagattaaaggccaggcccactttttgaatgagaaataaagcctggggtgggctgagggtcagggggagtgtgggtgggaaagttctttcttatttcaaacgtgtgcctctggcttttggagaaatgatattgaacatggtgtacctgtagggctgtaaagaaccatactgataatctagtccagcgtcttggatttattgctgaggaaattaacagatgagattgctcaggagctttatatgtgaccatgtaactaggaggcagaactgggcagataccaagacattttcatctgaaccgctcagcctttatgaaacatcttgattttttgagggctatttcctcaacagaatactttaaaaaaaaaataaagctagaatcaaagatatttgatatgaaaaagtaaatttgctagtaatggaacgtatagttattaaagtagttttgttaatataataatttatagtgtgttaagtagaccataattttttagaacagcttagatttacagaaaaattgagaagctagtatagttttcatattccccacactcaatttcccatgttattcacatcttacattagtcaattaatgaaccaatgttgatgtgttctcattaactgaaatccatacttcattcagatttccttagcttttacctagtgtcctttttctattccaggattacattgaggagatcacattatgtttaatggtcatgttttcttcagactcttctggtcttgacagtttctctgaattttctggtttttcatgaccttaacagttttgaggagcagtgggcagctctattttagaatgtccttcaattgaaatatgtctttttttttaaatatgattagtctggggttatgggctttttggaggaagaccagacaggtaaagtgctatttcatcacatcatatcaaaagtatatatcaacatgacttatcactgtcgacgttaacctggatcacctagctgaggtggtgttttcaggtttctccagagaaaaaaatgacccattttttccaccttttcatatggtattctttggaaggaagttactatatccacctcacacacaaggaggagggaattatgttccacctccttggggacagagtatctacatacattatttgatatagtggggttttatattctaagaagagtgcagggcacagtggctcacacctgtaatcccagcacttagaccgaggcgggtggatcacttgaggtcaggagtttgagaccagccttgcaaacatggtgaaaccccgtctctactaaaaatacaaaaattagctggggatggtggcacacacctatagtcccagctactcaggaagctgaggcacaagaatcgcttcaacctgggaggtggaggtggaggttgcagtgagccaagatcatgctggacagagtgagactccatctcaaaaaaaaaaaaaaaaaaaaaaaaaaaaaaggaaagcttagaaccttctatatgattttatatgttattttaatatgttgtatatgttatttactcatataaatttacccaagtagcatctgaaaataacatgaatgattgaaatatagatcgctcatactgagtttatagcttttttcttctccctataattaaaaaaaaaatagaactgaaaatttgattaatttgcgttttcacttatctatgccaaaaagaagctagctaaaaatgaaacggggtagctggagaagtagatgtgaatattttctatattggatatcaacccctaattaataagtgatgcacactatgtttcttattgacttgcttaatttttttcttttctttttttttttttttttgagatggagtcttcctcgatctgtcacccaggcaggagtgcagtggcatgatctcagctcactgcaacctctgcctcctggcttcaagcaattctcctgtctcagcctcccaagtagctggaatacaggcgcccgccaccatgagcagctaatatttgtatttttagtagagacggggtttcaccatgttggtcaagctggtctcaaactcctgacctcaggtgatctgtctgtcatggcctcccaaagtgctgggattacaggcgtgagctgcctctttcaaaaaaaggaagagccgggtgtggtggctcacgcctataatcccagcactttgggaggccaaggtgggtggatcacttgaggtcaggaagagacaagcctggccaacatggtgaaaccccatctccaccaaaaatacaaaaattagctgggtgtgggtggcgtgcacctgtaatccaagctacttgggaggctgaggcagaagaatcacttgaacccaggaggggaaatagaacgagactctgtctcaaaaaaaaaaaaaaacccacaaacaaacaaaaacatgaaagttaaaaagagagggaaccaatatttacttagaacctcttgtatgccaggcggtttacatttatatgtgtatttttacctttttttattttttttgagacagggtccagttccctcacccaggctagagggcagtggcacagtgacagctcactgcaacctcaaactcctggcctcaagtgatcctcccgcctcggcctcccaaagtgctggaattacacggatgagccaccatgcctggcctacatttatgttatctgacaaacactcagagaactgatggggagcagtggagtatactgtccccattttacagatgaagaagctgagatttggagagattaagcagtttgcccaaagtttatatagaccaacctggatccagtccacgtctacaaaacctctaagtgttctttgtattctattatgcaccccccaccatttttttcccctatacttcatggtgaatttgataaaggggaggaggaaggaatagtttgtcctaattcatagaacattctaaagtaacgtgtttggcattccacatgaaactacttttctatgacttatgtaatttataaattgattgttggctattaagtacttgggcaagtcccttcacacctaaatctcaatttcgaaatggataaaaagagaactttgagcaggccagcctagagtgcctcccagcagtcaaacctgcacccggctccatgccagtcctttccccctcttgtctacctgcacatcctctgaggactttcattttcttggtatggatttgggctcttattataaaagactagcattaataagtacagtaaaaagtaggccattcataacaataacttattaaagatagttttatttgatttttgataatcttaagaaaaacacaagtgtgtgcactaaatcaagttggcaagactgtgtaatctgatgccaagtataaactgagcagacttcaggcttactgacatcagattcttcggttatgctttctttttactttttaaaaagtacttctagtttcctatgtttgggtggtttcccttcccaagctccttccctactcttattccaatttcagtaaaaaatgcagaaaatggaggaaaagccaagaaaggctgtgtgctcttgcacacagtgaagtgagtggcagtgcagaaatcagcagtctccctttcattgaaatttgcccaagtagccaagtcttgagtagagtaagcccagacagggttggttttctctgaattaacctgagaggctcctctcctttacttagggcaaagaagaagctttcttgagtactgttgcaggaaaacataatgatggcaatgcagttaattgagaagcaaaatggaacattcacctcctcttctcaaagtgaaatgtttatttatttatttatttattgagacagagtttcactcttgttgcccaggctggcatgcaatggtgcaatcttagctcaccgcaacctctgcctcccgggttcaatcgattcttctgcctcagcctcccaagtagctgggattacaggcacgcgccaccacgcccggctaattttgtatttttagtagaaacagggtttctccatgttggtcagactggtctcaaactcccagcctcaggtgatccacccacctcggcctcccaaagtgctgggattacaggcgtgagccaccgtgcccagcgtgaaatgtttatttcttcaagtgtgtatcaactatcaggagattgtcacaaagtagactgatgacagagaaagtcattttatgcttcatgttttctaatctctgaaatgagagttacagtatctatcctcctacccaaaagactagtataaggataaaataaagcaagaaagagcttaagaggtacaggtgttacaccaacataatggtacttccattgaaagagcaagctgttctagcagaattcgaaatgtgagattccatgcaaatcttctagataattgggcatttacccttaagcactaagtggaatacttaaaaagttatttatttagttcattgatttaggttagagacagggtcttgctttgccacctaggctggagtatggtggcaaaagtgatcatagctcactacagcctccaattcctgggcttaggtgattcccctgccttagcctcttgagtagctaggacaacaggcatgcaccaccaccacgcccagctaatttttttttttttttttttgaggtggagtttcactctttttgcccaggctgtagtgcaatggcttgatctcggctcactgcaacctccgcctcttgggttcaattctcctgcctcagcctctcaagtagctggggttacaggcacatgccaccaagcctggctaatttttgtatttttagtagagagggggtttcaccatgttggccaggctggtctggacctcctgagttcaagtgatctgcccacctcggcctcccaaagtgctgggattacaggcgtgagccacccgcccagcctttttaattttttaaagagaccaggtctcactatgttgtctaggctggtctcaaactcctggccccaagtaatcctcccaccccagcctcccaaattgttgggattactggcatgagcccctgtgcccggccataaatgaaatattgaacatcatttcactatttcttatagattcaatgtcgtcaccatgaatactaattaaggagctgttcagggtctttgcccttcagtctaaatggcttcaggctgctgcgattcttttgtgttcttcctcctgtgttctgagctcccattcctttcttacttacagactgtcagcttccccctcgtgtgctgttaaagcgatttccttcatcttttccagtgttctgctctggtgctttgaaatctggtaattcattagcactgtcttgatgtaaaagtaaatttggtcagtagtggggaattgtcatgatttgaggacatgatctttgtagcctctcaatggttatttaatctatcatatactatggacattatttttattttctttctatttttcctctactatggggtattttctttagtgtttgtaagattctggcactttaataagactccctgtagtgtttaacagtggtttaaattttaatgatttgcctgtagtcccagaggcaggagaatggcgtgaacccagaaggcagaggttgcagtgagctgagatctcgccactgcactccagcctgggcgacagagcgagactctgtctcaaaaaaaaaaaaaaataaataatgatttgaagtaagttctgaccagccctcccctcctctaggaagctttactaaattaggcaatggaggtcattacattttcttcatctaacaggaattttgctgagttcttatcatttctgttgtgtagactcttagttcttccttagggtaggaaccacacaactttcctagaaaatcctgtcctttggaacggggctggatactgttcgcatgcaattgtcccagagctggacaggccacactgcttgtgctgctggaatctgctagctgatatttgacttgaagttgtttttctacctccatttcaaaagtgaccagaatctttactttttctctgataaaagattcagaaaaattagattggcctagcacggtggctcatgcctataatctcagcactttgggaggccaagatgggaggattacttgagaacaggagtttgagaccagcctaggcaacatagtgagaccacatctctacaaaaaatttacaaattagccaggcatggtagcacgcgcctgtagtcctaggtccttgggaggctgaggtaggaggattgcttgagcccaggaggttgaggctgcaatgagccctacttttgccagtgcactccagcctgggtgacaaagcaagaccgtgtctcaaaaaaaaaattgaatcagtgcctacgtgttaatttaagtgttcctgaagctggtttgattccttttgtgcctggcaggctatggagcatggtcctacggctgtctgcacatggccatgaacccccaaaattaaatgcaagcatttgtgtgcctacagttttcttcaacatttcgagaaatggcctttaaacaattgtcatacgttaatatattattgtttcttcactacatttcctctccacatctaattagtactatgtctcattcagaggattaaaaatactctcgacaccttattttatttgcatggtgtggtaacgatgacagattgcagttgaaattttaaacttgtctcagacatctcttctatgaaaggaaatgactttcttataagacagacatgtgatgtttgcaatggtcattatactataaattcaaatgattattttcttcattcttaatcatctgtacagtggaagaagtcacataagacagtgtggagctttttaaatctcaccaaatctgaatctttttcaggccaggagaggacaaacaaaggcactggtttttctggtggcttttaacactgattttatacaccactgagacactgtgtttagctcatcttttcaggaggttatttgccgtgttctagaaggagagatactgaaatccctctttttccttagccatcagatttgaaattaaaatatgtgtcaggtaacatgtccatgctcataaccaacaacaacaaaatggaaatggaaacagttgtatgtagaggagggtgggtgttgggcatttggcacttgtgaatgccaaatattcacaagtcgtgtgtctgctgaatattttcttccttcccttggcaaggtagaacttctttgatctcgttaagaaaaaaaaatgtaaaattaatggtttaaaaataaatagtgctgtatagaggtgaggctttttaagcaagcacaccatgtctgagcaatctaaagttaaagtatgttatcaatcaacttctttcccatttattttagaggaggagcagtggagatggagaccttatgtcaagtttgaaaaagcactaaaggcctacatgttaaaatgcaaaattgttcttgtgtaatttaggttctcccacagctgtattcctttgtgttgttggattagttaacgtttatgccatatgcttgacataatccatagtacaaaataatccagaagcacaagaggtctaatttgtcataaaagatccataactttcagcccactgattttcctcaggttgaatatctggcaatattttaaaaaatatttaattagtatttattatccatagtaaagcaagtttaggattgtgtttatttttctgaattgttttctagttgaaacccagatttggaatagtcaaatcttgaatctgcttttta

SEQ ID NO: 637 - protein, 351 aa, Homo sapiens
MGNAAAAKKGSEQESVKEFLAKAKEDFLKKWESPAQNTAHLDQFERIKTLGTGSFGRVMLVKHKETGNHYAMKILDKQKVVKLKQIEHTLNEKRILQAVNFPFLVKLEFSFKDNSNLYMVMEYVPGGEMFSHLRRIGRFSEPHARFYAAQIVLTFEYLHSLDLIYRDLKPENLLIDQQGYIQVTDFGFAKRVKGRTWTLCGTPEYLAPEIILSKGYNKAVDWWALGVLIYEMAAGYPPFFADQPIQIYEKIVSGKVRFPSHFSSDLKDLLRNLLQVDLTKRFGNLKNGVNDIKNHKWFATTDWIAIYQRKVEAPFIPKFKGPGDTSNFDDYEEEEIRVSINEKCGKEFSEF

SEQ ID NO: 638 - DNA, 1056 bp, Homo sapiens
  source 1..1056: mol_type = genomic DNA
atgggcaacgccgccgccgccaagaagggcagcgagcaggagagcgtgaaagaattcttagccaaagccaaagaagattttcttaaaaaatgggaaagtcccgctcagaacacagcccacttggatcagtttgaacgaatcaagaccctcggcacgggctccttcgggcgggtgatgctggtgaaacacaaggagaccgggaaccactatgccatgaagatcctcgacaaacagaaggtggtgaaactgaaacagatcgaacacaccctgaatgaaaagcgcatcctgcaagctgtcaactttccgttcctcgtcaaactcgagttctccttcaaggacaactcaaacttatacatggtcatggagtacgtgcccggcggggagatgttctcacacctacggcggatcggaaggttcagtgagccccatgcccgtttctacgcggcccagatcgtcctgacctttgagtatctgcactcgctggatctcatctacagggacctgaagccggagaatctgctcattgaccagcagggctacattcaggtgacagacttcggtttcgccaagcgcgtgaagggccgcacttggaccttgtgcggcacccctgagtacctggcccctgagattatcctgagcaaaggctacaacaaggccgtggactggtgggccctgggggttcttatctatgaaatggccgctggctacccgcccttcttcgcagaccagcccatccagatctatgagaagatcgtctctgggaaggtgcgcttcccttcccacttcagctctgacttgaaggacctgctgcggaacctcctgcaggtagatctcaccaagcgctttgggaacctcaagaatggggtcaacgatatcaagaaccacaagtggtttgccacaactgactggattgccatctaccagaggaaggtggaagctcccttcataccaaagtttaaaggccctggggatacgagtaactttgacgactatgaggaagaagaaatccgggtctccatcaatgagaagtgtggcaaggagttttctgagttttag

SEQ ID NO: 639 - DNA, 27597 bp, Homo sapiens
  source 1..27597: mol_type = genomic DNA
cttcgcattgcccagacaggaaatacagacggggaacaggagcagggaatctgcctggctgtaccccagattcctcatctgtgcaatgggagtgatgatggtagcacctacgcgatgggagtgtggtgcgaaggagcgttaagtgggtgccagctcttactactggcaggagcccagggctagggcccagcaaaggggtggacactgagcgccccttcccagccaccccttgcgccgggcccggcatcctcctgagtgcggctgggaaaacccaggaggccccgcggcctggcccccaagcaggcctggcctcggccgcccagcgccaggccttatgaatgacgccggcggcggccgggcgacctctgacccgcgcgccggccgcgcccctcccccgctggcaggtggacagcggctgcgccgggcaggccgcggcgccaactccggctggccgacagccgctgccgcactgagcgggggcgggggactgcggcgcgcgcggggccggccgggcgcccgccggggccgcctcctgagcctcggagcgctgcgcggccgccagccagcctccgccgccccgccccgccggcccgggcccgcagactgcgtctccgccccgccctctcacccccggattgacactgagcgttctgctggggggcttggcggacccggcacctccgccaatcggcggcctcgcagggcggaccccgggcccagtccagcgtctcggccaatcggacgcgtctgcccgcccagctgcggcctcgcgagcgagtgaatggccgagagtccgcggtgcgtgtcccgaggctgagagcctatagtggcgcgggaaggtcgcgggagggccaatgggaggcggcgctgagccgtcagtcagggcggcctaggccaatgagcggcgggctgcgggggcgtcacagacagcggcagagatcttgggctgaggttcccgggcgggcgggcgcggagagacgcgggaagcaggggctgggcgggggtcgcggcgccgcagctagcgcagccagcccgagggccgccgccgccgccgcccagcgcgctccggggccgccggccgcagccagcacccgccgcgccgcagctccgggaccggccccggccgccgccgccgcgatgggcaacgccgccgccgccaagaagggcagcgagcaggagagcggtgagtgcccgggctgtgaccccgatcttggccctgcgctgccagccctggccttgtccatcatcgcctggcccctccccctacggggcccctcatcctctctgcctaccccccagcgccccttgccccggcctgtccaaggctggggcccgcgggcccgcagagtaccccctgtaggggtccccttcccctagggccgccccatgctgcaaagaccgtgctcccccccagctgtcactgccaaccatggcacgtatgaccgctggggccccacatgggcccctgtcaccagcctaccccctcctttcctggcccctcttcccagattctaatccccccacttcctcactcacctctctcacctatgggatcctctgcctgaccccgacccaggtttctaccagtttgggaatgcgatgaggtctgtctgcctccaccgcgcagggaccttggccacttgctgaccacacccctcccccctccagcccccgccatctttctcctgccctttccctcttcaccttagcacagcccccccttccaaacccatcctgccccctgaacatttcccagagccacctccagcattatttttttcttctgtgtcacttggcatgggggacaggatctttctgggtccctctgcctctctcatcctgtcactctgtcattctgctgctctgcttgtgctccgtcctccaagcaagcgtctgtccctggctggggtagcagactgtttatgaacgtagagaattgcttcagtgcttccaaagccaagtttgagctggtcttgttgggattcattgcatcctctttcctgcgttggggtaagggggtggtggcagagccccctctcatttcctgtcttgcagtgagctctaggctccatggagggcccctcaataaatggtcgtttcacaactgaggctccgtcattcacccagtccctggggcttcttccaccactcctggcttgggatgaaaagtgtctgggtttagcgaggttcattcggttctaactgagatggtcagaaagagcactggggaggaggaggcagtcaaagagagtaatgggtgacgtctagtgatttgctttgacgtctagtgattctgatcattcccagggctcagccagagagagacctgtttcacccacttgcccacacattaggttggtcttttccagccagccagagaaagagattctctatctggaaataccatcagaaatggtcttgaaccccattcccaatttttacagctcttaaattgttgtcactccagtctgaaagctggaaggcagctgggatcccctgtccacttacccagaaatagtcggaactattggtcgaaaaggaaggccagtttttggtctcaaaccccagcatctgagtttcctgaatgccccctcccagaaaggtatgaaagccagggaactttattcccatacggattcaaatagcagaactcagagtcacagagcgatcatgaagaggcctgacatgtcaccaatgggtgggggctggggagggaaatgcctgtagctgagtgcctgatgacagaggagcaggtgggtagtgtccaaaaaaggtctgggcatgagcttggaggggacttggccggggggggaggagtcaggcccccagcaggtgaggccagctgggaggtggaaggtagaggcaggcagctatatattgcggtagctcagttgaaagttggggagatgacagtcctggaaaaccttcaaggctatcagacacatgtggtggggggtggaaagccacacaagaaaaaggatcccaagaaaaagatcagaggctctggaaggaaccactgattctctcagagcacaggtcagacacccaggaatgaatgatcatggtaaaatagagctactatttattgggcatctaggctgtgccacaggctaaatggccaggcggatagagatacctactctggtgactttcataacgggctgttatccaaattttccaaaggagccctctggtagaaatgacatccatgacatagatgatgtcacagaggcaggattcacatccagatccatctaccagcaaacttcttggaccccagaattccccgactttgacatttttcagcagcctcccagatttttactctatcatattttcttaatttaaaataataaaagttttactcacttgtgttcagatgtaaacttggagctcattctaaacaataatataaatgaaatcatgggattgccatgccagttatattttctctgatacgcattaaatacagtgtaactagataaatgaaacatcccgaaaatcatgtcatgttctgccaatgggactatgtcacacgttgagaaacgcccgaagctgtacttcctcccagaggctcccagagaaggaaataagatgaggaaggaagtccctctttgctttgaggcgctctgattctgagaggatggagttagacaaaatttgccctcttagaagggtggggcaggggcaggggcagtagccaggccagcctgcagggggcacctggatttcatctgccagacgccggcccgactggggtcaggaaaatgcccaggccttgggaggcaccagttaagcatcctgcagtcccctgtggtaccatctctgtgccagggcaggacagagtccgcctcctcccaagaggccagggatccagaatgaaccctggagtggagttgggggaatctacacccaaagatggcaaagccattgggagagctgagagggccaagaaaaaagactaaggcccaggctctggccaagttggaagaatggagagggagcagcggccccagggggcaggcgcccaggtcagacagccaagtggggctcaggtcgtggctggcactggctgaagatacccctgggagctggcccacaggggaaggggcagagctagtaaaagggagcccccgatccccaggacacaagcagatcctggcaaagagagaaaagcaccccccaagaagaccctagatgggaagaactagtgccgtgtaacatcctatggatgcctaagacggccaaacaccttctgtgccttggcagttgtatgggtgcccaagaggtcttatcaaggcagctctccccttagcgcaaccgcgtctacagaaactcggagggccctatctgtccctcctccacacccagtggcctctgggttgggtttctcttcctgctcccaccccacggctccctagctccccctgcaggcagggttctggggacagacagccgaacagacacggcaggtctcatgagccttcccagccaccgtagtgccggtgccctgagaacaggactgagtgatggcttccaactccagcgatggtgaggctgagtcctgttactatagcaacttcctaggcacactctgccccttaagtcagggaggggctgcagcggggtctggggcacaggcgaagagaagaaggatgtgaacccctggctggccctggaaacgcctcctgtacagccccgggctgtgcggcctggggaagagagaggggatcggtggcccagttcagacaagggaggatggtccacccggcagggggccagctcagagaggggtggtggagtggtccatcccagtgttggggttcagctcagactgtaggatgagccatcccagtgttggggtccagctcagaatgggggtcgttccagccagtgttggggtccagctcagagttgtgtcatttaggtaagcccagagcagggaatccaggctccactggaggaatcagccagcctcgagtagggggcccagcccaggctgggcattcctgccccagaattcccaggacagccagatttcaaaagggcagaaggtctgagattgttgtccggaggaagggggttctgtggctgggctccttccgagagagaccccaagccccttgcccaaattgatattctgctgttgcaattccccattcccagggcgagtttctagatttctgctttctgctgtggtcctggcttttcaaggggtgtcaaggagttttccctatgaacccaaatggaatctggaccagagtgagagctggcaccccccgtgtgggagatgtgggcagggcggcaggctgtacaggccagcagctggctgggttaccatcctctgccacttcctgttgctagcaggggtcctggatgccgggcacactcaaagaggctgccactgaccctctgcttcttttgggatctggaaagaaggaggaagatggtcaaggctgcctccccctcccccacccctgggtttagccgctcgtttccggtttggactttcatggccgagagtagagccaagcacagggcaaggtttgagagaggccaaggacatcccgggatgcctttcccctctccacccccgcataggagcaaaacaaaagagtcagatatacccattttctctctcaggatagcaggatttgggggttccacattgaaagggagttcaggggaggaggcagggtggctcttgtcgccccccgccccaagcctttctctccagctgttctttcagcgaattaagggagctctggggcctctttagcccctaaggagtctctggctgttgcctgatcctgaaccttaactctttcccctctgcccagtgggcactgctctgggcacatcaggcgctgtcctctgcacagtccagtgcccactgaggaaggcagggcctggcgtcctgggagcagtgaagtccgtggaaagggaagttagttttatcgccccgccctggggcacgcaggccagccagagggacaccctcgggagaatcttcccattgcctcctgccaagggagccctctgcaaaccttggctagcttggagcaggtacctttaaaagcttctgtggcaaccagctcctcctccctggtcccctgaggccatcccaaggaagctgacttagaggctctgcgttttcctggtttctcagcaaaaggaagattccagggagagcccaagggggctggggatggatctgggatcaggcagcagccagggtggggacttggagaccaccttccagctgtggctgcagctgctcctctgggcccacctggctgtacgtttcctgggctacctgcaccgcaccttccgggggcctaagccacagccagcaccctgagcctccctggccagggggcagaaggccgccagatcaccccatcccacccaccctttattctaccctttcctggaagagacaggaagcagaggtgagtgtggggcctcttgattgaggttacctgcccctcccccccatcatccctctctctgcctgctcctcctggcactggcctcccccatgccccatccccaaatctgacaagctaacagggctagtggcaccagaggggacagagcctgggcgctctggtcctttgagaggccagagaagggccatgctaacagcaaggcaccctgtggagcgactctgtggggcaccagcggacagccaggggctgggagctcagcgagtcggggaggtgcaggattcagcaattctttcctttttgctaagagcaaagggaaaacggaccagaccttttggattcccttcaagcctggcacctctctgccttcttgtgtgggtgaaggtagaatcccaagagggcaccctccaccctccccacccactgctgaattctgtgtggattatttggaggtttccaaggaagatgttttctgtcacaaaggttctatgactgaagccaggcacagtggctcatgcccgtaatcccagcactttgggagactaaggtgggggaatccattgaggccagaagttggagaccagcctgggcaacatagcaagaccccatctcaaaacaaaataaaacactcaaacaaaggttctgctagtgaaagtgttggatttggtgtgacccccaggctcaggcccctgggctagttggtggcccagccaggcacccatctaggactcctggccattcattgcctatcccctctccgcctggtcatttattgtggggccttcttggccacggtctctctccatctgccatctaccactttcttttttttttttttgagacagagtttcactcttgttgtccaggctggagtgcaatggcgcgatctgagcccactgcaacctctgcctcccgggttcaagcaattctcctgcctcagcctcctgagtagctgggattacaggcatgtgccaccacgcccagctaattttgtatttttagtagagacagggtttctccatgttggtcaggctggtctcaaactcccaacctcaggtgatctgcctgtctcagcctcccaaagtgctgggattacaggcgtgagccactgcacccagccaccatctaccactttctagctccatgagggctcttctctctgaatgctgagggaaagctctggagacaggtagtgggggtggctccccacaaggccatgtgggattactggcaggcagataaccagcaatgccaaagggcaagtgtacagggcccctcggtggcagcaaacccaggaacatcagggggttgaaggcagctctgtccacattggccaccctggtgcactggactcagcactgaaaccaatggctgagttggcagtgaagtagttaatctcatgggatgtgggggcaggcaagtgacctcagacctgatcagtcttctcctctgtacagtgggaataacagcagctcccaccccacagggtgagaacgaagcatagaaaatactcagcaaggggctggtcccttgtagccctaggtggtggttaaaaggacaagtccataatgcaagaatctgtcaggctgcgcatttaagatttgagcactcagtgtatctcctatatttgtttttggggtttttttattattacttttttttttgagacagggcctcactctgtcacccagcctgcagtgtaatggctcagtcacggctcactgcaggctctatgtcccgggcttgaacaatcctcccacctctgcctcctgagtagctgggactacaggtgcataccaccacacctggctaatgtttttattttttgtagagggttttgatgttgtccaggctggtctcgaattcctgtattcaagcaatccccccaactcggcctcccagagtattattatttttttgagaaagagtctcactcttgctcaggctggagtgtagtggtgtgatcatagctcactgcaacctcaatctcctgggctttaagcaatcttcctgcctcagcctcctgcttagctgaaactgcgggcatgggccactatgctcagctaattttttaattgttttattttttgtagagattgggtcttgctatgttgccaaggctggtctctaattccaggcctcaagcgatcctccaacctcggccttctaaagcactgggattacaggcatgagccaccgttcccggctctccctatgtgtgtgtgtgtgtgtgtgtatatatatatatatatatatatatatatatatatttttttttttttttttttttttttttttgagacagagtctcactctgtcgcctaggctggagtgcagtggcatgatctcagctcactgtaacctctgcctcccaagttcaagagattttcctgccccagcctcccaaatagctgggattacaggcatgcgccaccgtgcccagctaatttttgtatttttagtagagacggggtttcaccatgttggccaggctggtttcaaactcctgacctcaagtgatctgcctgcctcggcctcccaaagtgctgggattatagacgtgagccaccatgcccgatcgctccccatattttcttttcttttttcttttttttttcttagacgagtcttgctctgtcacccaggctggagtgcagtggtgcaatctcggctcactgcaacctcagtctcccggattcaagcaattctcctgcctcagcctcccaggtagctaggattacaggcacacatcaccaccacgcctggctaatttttttgttttgttttggagacagagtctcgccccgtcgcctaggctggagtgcaatggcatgatctcagctcactgcaacttctgcctcccgggtcgaagcgattctcctgccaccatgcccggctgatttttttgtacttttagtagaaacggggttttaccatgttgaccacgctggtcttgaactcctgacctcaagtgatctacccgccttggcctcccaaagtgctgggattataggtgtgacccaccgtgcctggcctcatttttttatttttagtagagatggggtttcgccatgttggccaggctggtctcgaactcctgaccttgtgatccacccaccttggcctcccagagtgctgggattacagacgtcagccacctcacccagcctctctccccatattttatacctcaatttagaaaataataggctgggcacggtggctcatgcctgtaatcccagcactttgggaggccaaggtgggcagatcacctgaggtcaggagttcgagaccagcctagccaacatggcaaaaccctgtctctactaaacataccaaaattagctgggcgtggtggcaggtgtctgtaatcccagctactcaggaggctgaggcaggagaatcatctgaacctgggaggcggaggttgcagtgagctgagattgtgccactgcactccagcctgggcaacaaagtgggactccatctcaaaaaaaaaaataataataattaaaaaaaataaattggccgggcatggtggctcacgcctgtaatcccagcactttgggaggccgaggcgggtggatcacgaggtcaggagatcgagaccatcctggctaacacggtgaaaccccgtctccactaaaaaaaatacaaaaaattctctgggcgtggtggcaggcgtctgtagtcccagctactcaggaggctgaggcaggagaatggcgtgagcacgggaggcggagcttgcagtgagcggagattgcgccactgcattccagcctgggcgacagagggagactccgtctcaatcaatcaatcaatcaatcagtcaatagatagataaataaaaaataataatagctgacatttatctggcactatcatcacacggggccactgttcaactccctttgtcaagatgaactcattcattcctcaaaaccaccccactttacagatgaggaaaactgaggcctagagaggtgagatcagttacccaaagtcacagagttcatcagagaccaggctgggctctgaactggatcttgaccccaagtcctggcccttagccactttgctgggctgtgtctcagcagagacgagaatgactgttttcaagcctgtttcctgggttgttaagtggagacaatggatacaaggcaggttgccgagtgagtcagatgagacagtgtagacagcagccggcacagggtctgccggggaagtttcaacattagccaggcggtgatgttcaccttgggataccatggggccgaggagtgggcatcgggcgagacttcccttgaaccagctctggagcaatgcccttgcgattgccacggagaggaacagggccagctgggggccaaggtgacagctgagccccccaagggcacctgctacccgagcccccgaggcctccatcccaggcccggcctccccagagaaggggccagaggaacagccaaatcccaaggctataaatacctcggctggcgtcggccctggccatggaatgtcggtcagaactggggcgagtgggggtgggctggtctgcctgggcacctccctccgttcccctgcgagtgacccctgagactctctgtaccccactttggatggagtggcagctggatcccacctctctgtagcaagggaggcccaggccacggcccagccaaggccccagaggcaccagaaaaaggtcaggctctgggttggaactgcaccccactttccaccaagtatctccccagaaatcacctgaacccaccccggtgagacgggcgtctctgtataactctcccctctctccctttcagtgaaagaattcttagccaaagccaaagaagattttcttaaaaaatgggaaagtcccgctcaggtaaggctgccgggtgcagagcccagggaggggtgagctgctaacccccagcccctggctgtgtcccagcaacacagctagaatttcagaaaccccatagaaggcttcagaccctccccatttgctccctaggtgcccatgggggctcctgtgtggagacacctgactgcccaatgccaggcacccccatcccaccacccctcccaacggcccgcccctgcccccagcacagctgccagcagcttccaggccccaggccagggccggatctggcccctgccacccgccttaaggaatgtgccctctgccatcttgattttccgccccctgtcctcaccccgctgaccccacgtgctccccggggccccctctgccggtggcagaggggatgccccagaccttagccaagcaggccgcggggagggcgtgccctgagcctaccgacccctctgcccacagaacacagcccacttggatcagtttgaacgaatcaagaccctcggcacgggctccttcgggcgggtgatgctggtgaaacacaaggagaccgggaaccactatgccatgaagatcctcgacaaacagaaggtgaggtggcctgtcctcgctcagggcctgcctgtcaggcctttgcctggactgtgcccactccttagagtgccctatccacccgttcactcacttgcttttttttgattcagagtctcgctctgtcgctcaggctggagtacagtggcgtgatctcggctcactgcaacctccacctccctagttcaagcgattctcctgcctcagcctcccgagtagctgggattacaggcgcctgccaccacacccagctaatttttgtatttttagtagagatgggttttcgccatgttggccaggatggtttcgaattcctgacctcaggtgatacacctgcctcagcctcccaaagtgctgggattacaggcgtgagccaccgcgcctggccgcttggtttttttgtgggggacaggatcctgctctgttgcccaagcaggaaagtgcagtgacgtgatcatagctcactgtagcctcaaactcctgagctcaagagatcctcctgagtagctgggactacaagcgcacactaccatgcctggctaatttttttttgttgtttgtttgttttttgttttagacagggggtcttgctgtgttgcccaggctggtcttgaactcctggcctcaagtgatctcctacttcagcctcccaaagcacagggattacaggcatgagccaccatgccaggctcacccactattccccgagcccccataatgtgccagccccaggggtcagaagggccctgtgccgccttcccaaagctccctctccaggccggccatggattcaaagccaggcactgtgacacagggtcagacaccagcccaacaggaggagaacaagagcactcttgggggaagtggtgtttatgtgcactttcttcccgtaaatatttttgtgatcggactttataccaggcactgctataaagcagcaatgtaactagcagaaatgtaacctgagccacagaagcaattttaaattttctgtttgctccatcataaacagtaaaaacagccaagcacggtggcgcacgcctgtagtcccagctactagacaggctgaggtgggaggatcacttgaacccaggagttcaactccagcctcgacaacacagccagaccccatctctaaaaaaacacccaaagtttgtaattaaaagagaaaatgaaagaaacaggtgtcattcatgaaattcattttaatgacatgtttggggcttttttttatgtttttttttttttgagacagagtctcactcttgtcgcccaggctggactgcagtggcgtgatctcagctcactgcaacctccacctcccaggttcaagtgattctcctgcctcagcttcccaagtagctgggattatgggtgccaccaccacgcccagctaacttttgtatttttagtagacttggggtttcaccatgttggtcaggttggtctcgaactcctgacctcaggtaatccgcccgcctcagccttccaaagtgctgggattacagatgtgagccaccacacctggcctaatgatatgttttaattaagccagtatatctacagtattaccctttccatatattatcaatgtgaaaatatcattaatgaaacattttacattccttttgtttttttcccagtcctccatgacttcggaaatatttcctttttttctgtactgaagtatctttaaaatccagtgtctattgtatgcttacaacagttctcaactctgatggtaaatttttcctggaaagataagaaaaagcagggaagttgaaaaagcagattcacatgcccaagttgttccaaccatgcctgaaagtcaccagtacctgcatcaagagtttaatttttgttttgttttgttttgttttgtttttgagatggagtttcgctcttgttgcccaggctggagtgcaatggcatgatctcagctcactacaacctctgcctccgggtttcaagcgattcttgtgctccagcctcctgagtagctggaattacaggcgccggctaccacgcccagctaattttttaattttttttttttttttttttgagatggagtctcgctctgtcgctcaggctggagtgcagtggcacgatcttggctcactgcaacctctgcctcccgggttcacgccattcttctgcctcagcctcctgagtagctgggactacaggcgcccaccaccacgcctggctaattttttgtatttttagtagagatggggtttcaccgtgttagccaggatggtctccatctcctgaccttgtaatccaccggcctcggcctcccaaagtgctgggattacaggcgtgagccaccacacctggccagtttttaaatatttttagtagagacagggtttcaccattttggcctggctggttgttgtttttttttttttttttttgagacggagtctcgctctgccacccaggctggactgcagtggtgtgatctcagctcactgccagctccacctcccgggttcatgccattctcctgcctcagcctcccgagtagcagggactacaggcgcccgccaccacacccggctaattttttgtgtttttagtagagacggggtttcaccatgttagccaggatggtctcgatctcctgacctcgtgatccacctgcctcggcctctcaaagtgctgggattacaggcgtgagccaccgtacccggcctggttgttttgtttttgagacagggtcttgctctgttgcccaggctgaagtgcagttgggctcaaatgatcctcccacctcagcctctggagctgctgggaccatagtcgtgccatgcccagctaattgcttttgttgtccttgttgttgtttgtagagatggggtctcgctacattgcccaggctagtctcaaactcctgggctcaagcgatttacctgcctgggcctcccaaagtgctgggattacgggcgtgagccaccatgcccagctggtgtcagttttttaatttatattttagatacttaaaatttttgaatttggctccccatccgaccagccatatttcaagggcccagcatccccctgtggctaatggggactgaactgggtagggcaggtatagactctgaggacacagctatgtgagcaaagcagttgacagctgactgagggaccaggctggccacatgttacacaccagcctgacatcagccagctgtgtgaccttggacaagtcacctcccctctgtgtctggtcttccaaactggcgtactcccagcatgggcctctagggcttctatcctgattcagtgagagactgggtgccaggtgcctgctcatggcatctgctattaggggacagctgatggctgaggagctgttagcctgaggttcaggttgctgtgtggagtgttctagacaagggtaaggcaggtcctaaaccccccacctcttgggcttctcctgcctgtcttttcaatttcagttcagctgccccttcctccagaaagcgctgtctgattcccccttccccagaccacgccaggtactttacatgggcttcttgggggctgcttctccacaaccccaagataccctccaccacggctctgacctctgtgggggtaacccatgtattctttgccctggacttagtgccgtgcaaggacaagcagcccctagcctccctgatgctgtgtcctcagcatcagctaagggcccgacaggccacaggcacacaaatgattctggctgaaggaaccggcctggctccggcatccctagttccaggcattaggggaaatgaggcccctctcacctccccctcctttctgccctcccctccttcccttcccaggtggtgaaactgaaacagatcgaacacaccctgaatgaaaagcgcatcctgcaagctgtcaactttccgttcctcgtcaaactcgagttctccttcaaggtggggtcccagtggccaagggcggggggtcactgcattgggtcccagccttctggcccccagggctggggtcggagctgaggacaatcagtggctgctctcttttgtggaagaacaagatccctggaggagggagatcaggggacaggagtcaggctgggactctggtagacccaagttcagttcctggtccagccagtttgtagttcgatacccttggtgagtcacccaacctcagtaacatccctcaaaagcagcacctggtttatggtaagagcctgacccaggagcacaaactctgccccaggcagccggggttcatttcccagttcagtacttcttgatgtgtggccccgggcaagagacttatctccccaagcctcagctttctcatggtaaaatggggatcataccagttccagcctggtggggttgtcatgacagttccaggcacgtcttgagcgccctttgggagccgttttgggtgccatccaaagctgtggtcatgagaaacaggaaaggccactcagggccagcttcatggacgtttgacccagagaagcacaagggcctgttctccgagggaccccacacctggtttaacgctttgctgctgctgctgtcttgagatccgtaataatttttttttgttgagacagagtctcactctgttgctcaggctggagagcagtggcgcaatcttggctcactacaacctctgcctcctgggttcaagcaattctcctgcctcagcctcctgagtagcggggattacaggtgcccaccaccatgcccagcttatgtttgtatttttagtagagacaggattttgccatgttgctcaggctggtcttgaactcctgacctcaagtgatctgcctgccttggcctcccaaagtgctgggattacaggcatgagccactgtgccaagcctaatttttattttttttattgagacagagtttggctgttgttgcccaggctggagtgcaatgatgcgatctcagctcaccacaacctctgactcctgggttcaagcaattcttctgcctcagcctcccgagtagctgggattacaggcatgtgccatcacatctggctaattttgtattttttagtagagacagggtttccccatgttggtcaggctggtcttgaactcctgacctcaggtgatctgcctgcctcgacctcccaaagtgctgggattgcaggtgtgagccgtgcccggccattttgttttgttttgtttaagataaggtcttaccctgttgcccaggctggagtgcagtggcgcaattacagctcacaacctttgcctcccaggctcaagcaatcctcccacctcagtctcctgagtatgagactacaggtgcacgccatgatgcccagctaatttttgtatttttgcagagacggggtctcactatgttgcccaggctggtctcaaactcctaggctcaagtgatccacccaccttggcctcccaaagtactgggattatacaggcatgagccaccacacccgaccctctgtaataattttttaaccaggggccatcttttttattctgggccccactaattctgcagcctatcatgatcccattttacagatgacaaaactgtggcctcagagccttactcaagctcccagagcaaggtactacagagttctctctccagccaaggcaggctaaccaggtcctgacatacctctgagccagccctcactttcacccattaacagcaggataagggtcgcccctgtagaacatgattcctacagggagccaggatcgctgttgtcatttaatgtttgaacaccagccggggaggcccccaaggccttcagatcgggtccaagtctcaggggtgggcccttgaccagccactgcttcccacaggacaactcaaacttatacatggtcatggagtacgtgcccggcggggagatgttctcacacctacggcggatcggaaggttcaggtaagcgggccaccccccatcacatcaggctgtcagggtgtccacaggtggcagtgcacgaccaagccccctgggaatgcagaggagtccagcatacttcaacatgcaggtggtctcccagaccctgtgggtttctgtttcccctctgctgaggaatatgtgatatttcaaccaccacaaaacaaaacagagcaaacagggcaacttaggtgtccaaactgaagttgctgccaggcacggtggttctcaccagtaatcccagcactttgggaggccaaggtgggcagatcacctgaggtcaggagtttgagaccagcctggccaacatggcaaaaccctgtctccactaaaaatacaaaactgagctgggcatggtggtgggcacctgtaatcccagctacttgggaggctgaggcaggagaatcacttgaacccaggagacagaggttgcagtgagccaagatcacaccactgtactccagcctgggtgagagagtgacatgccgtctcaaaaaaaaaaattgaagttgttgattttgtgcattttttgagccccaaaaggtggcatgcatctgtagtcccactagtcctgaggctgaggtgagaagatcatttgagctcaagaatttgagaccagcctgggctgcatagtgaggttttgtctcttttaaaaaaaaaaaattggctgggcgcagtggctcgtgcctgtaatcctagaactttgggaggccgaggcgggcggatcacgaggtcaggagatcaagaccatcctggttaacatggtgaaaccccgtctctactaaaaaaatacaaaaaaattagccgggtgtgatggcgggcgcctatagtcccagctactcgggaggctgaggcagaatggcgtgaacccgggaggcggagtttgcagtgagccgagatcgcgccactgcacttccagcctgggtgacagagcgagactccgtctcaaaaaaataaaataaaaattatactattattttattttatataggtggacagttttatatgtgtagattttaatatatatttttatacataaaataaatctatatacagaaatttgtaagtttaagatacaggctgggtactgtggctcatgccctataatcccacttggggaggccaaggtgggcagattgctagagcccaggaatttgagaccagccttacatagcaagaccccatctctacaaaaaaatacaaaaaaaaaaaaaaaaagtcaggtgtggtggcacattcctgtagtcccagctcctggggaggctgaggtgggaagatcacctgagtctgggaggtcaagactgcatgagcccaccttcatccctaggatgcaaggctggttcaacatatgcaaaaaaaaaaaaagactgcataagccgtgatcacgctgctgcagtccagactgggttgtaacccagtcagaccctgctgaaagaaaaaaaaaatttttaacttataaatttgtcttattaacttataagtttacatacgtagttttatttgattttattttttgagacagagtttcactcttgtcacccaggctggagtgcagtggcacgatctcggctccatgcaaactctgcctcccgggttcaagtgattctcttgtctcagcctcccaagtagctgggactacaggtgcatgcccccttgcctggctaatttttgtatttttagtagagatggggtttcaccatgttggccaggctggtctcgaactcctgacctcaggtgatccgccccccccgccttggcctctcaagatgctgggattacaggcatgggccaccgcgctggccttgtagttgtattttagatagataactatagattcactttacatacaacaaaatgcacagttcttcaatgttccatgctacaagttttgacagttgtatatagctacctaacctccacccaaaacagtatatggaacttttctatcacctaagaaaattcccttgaatcccttttttttttttttttttttccaataacatacagaggtggaggccgggtgccatggctcacgcctgtaatcccagcactttgggaggccgaggcgggcgaatcacaaggtcaggagttcgagaccagcctgaccaacatggtgaaaccccgtctctactaaaaatataaaaattagccgggcgtggtggtgcacacctgtaatcccagctactcaggaggctgaggcaagagaatcacttgtttccaggaggcaaaggttgcagtgagccgagattatgccattgcactccagcctgggcaagagagcgagactgtcttaaaaaaaataaattaatcaaaaaaaaatatatatatatatatacacacacacacacatatctacatacatacagaggtgaggtcttgcctatattgcccaggctggtctcgaactcctgggctcaagcgatcttcccacctcgaccccccaaaatgctgggattacaggggtgagccaccgcaccgggccgaatccctctcttgacacgtcacctccccaccaaaggcagttgtcctttctgacttcaaacaccgtgcctttgttttgtctgggcgtggacatgatataaatggaatcattcatgttcttttgtgtcttcttttgcttaacataatcagtttgaaatgcagccacattgttgagtggatgcatgggctgtcctgttggcggtggtggtggtgagtggaattccattgtatgactatagctcagtctgtgattccattttcctgtggatggacccacaggctgtttcccatgtcgggctatctaagaatcaggtgccttgcgtttctgacggctggactggaggtgtcttcctctggggtaggctctgcagggccacctgctggaccattttggggcatgaccactgacgttcacctccccatttgtccccatcagtgagccccatgcccgtttctacgcggcccagatcgtcctgacctttgagtatctgcactcgctggatctcatctacagggacctgaagccggagaatctgctcattgaccagcagggctacattcaggtgcccaccaggccgggcgaggggcagccctggggaagccgtggcctggacccttcctccctgccaactgcctgttcttgtgcccacaggtgacagacttcggtttcgccaagcgcgtgaagggccgcacttggaccttgtgcggcacccctgagtacctggcccctgagattatcctgagcaaagtaggagcctccccagccctccccttcccctgaggccggctctgctctcctgctctcgcctcctcctcaccctgtgcccccccatcttgctccagggctacaacaaggccgtggactggtgggccctgggggttcttatctatgaaatggccgctggctacccgcccttcttcgcagaccagcccatccagatctatgagaagatcgtctctgggaaggtgaggtccggatgtggggacacagccctggaagaaacagaccgttccctgctcacccatcctattccctggggagccctgcttgttgtcagaataatctagaagttccttaagtcaggccaggtggtgaagctggacgcgccggccacactgaggccaacacctcaagcccccttgctgtccagccccaaccccgcggttccagaatcccatgggcttccaaaatcccgagcctcacgggaacatcttggccacagaacacaaaccgccctgccagacgaccctccttttcgctcctcatcccagttagtgtgagttttcgcaaattccaaggcagaaaaacgaatgtatttggttcctgttcccaggtgctgtccatagcctcacccaggattgccctcacttagcatttatagcccatgcttcctctcccaaacccagacttgcctaactctgagggttcagatgaggggtggtgaagccatctcagctcacatctatgacaggtgcaaagtgcccaccatccaccaggccccagaatccccatcagtcacaccctgagatagtggcaccctctgtaggagaggtgaggaaacaggctgggaaaagggatgtgtcttggccaagatcacactttggtgagtaggtaatcaccgtaggcaatcattgtaggcactgatggccggagagaggttggggaccccacctctgccctcagctcaaccaccttgctgggaagacccgaccatcccccgacttggtccagcatctcctacacaggagcttttggttggcccggagtcatgacactgtggtgggagcaccctcaggctcagcctgggccccagtcccagctctgccaccgactggctttgaaactttggggctgggtacaatggctcacacctgtaatgccagcaccttgggaagtggaggcttgaggccaggagttccagaccagcctgggcaacatagccagaccccatctctaaaaaaaaaaaaaaaaaaacaaactggccgggcgcggtggcttacacctgtaatcccagcactgtgggaagccaaggcgggcagatcacctgaggtcgggagttcgagaccagcctgactaacatggtgaaactccgtctctactaaaaacacacacaaaaaaaattagctgggtatagtggtgggcgcctgtaatcccagctacttgggaggctgaggcaggagaatcacttgaacccaggaggcggaggttgcagtgagccaagatcacaccattgtactccagcctgggcaacagggcaggactctgtctcaaaaaaaaaaaaaaaaaaaaaaaactaaaaattagctgggcgtgatggtgcacccctgtgttcccagctcatcgggagggtgaggcaggaggatcgcttgagcccagaagtgagctgtgagctgtgattgcatcactgcagtctagcctgggtcacagagccagaccctgtcttttaaaaaaattcaggcaagtggggtgccccagctggacacatagcatcactaaaagagaaagatgaaggccaggcgcggtggctcacacctataatcccagcattttgggaggccaaggcaggtggatcacgaggtcaggagttcaagaccagcctggctaacatggtgaaaccctgtctctactaaaaatacaaaaattagctgggcgtggtggcgggtgcctgtaatcccagctactcgggaggctgaggcagagaactgcttgaacccgggagacagaggttgtagtgagccgagattgcgccactgcacttcagcctgggtgacagagcaagactctgtctcaaaaaaagggaaagatgaggcatctgccaccggaccaaaagaaactgccaagaaaatggcccagagttggccgggtgtggtggctcacgcctgtaatcccagcactttgggaggccgaggcgggcggatcacgaggtcaggagtttaagaccagcctgaccaacatggtgaaaccccgtctctactaaaaatacaaaaattagccggatatggtggcacacacctgtaatcccagctactcaggagtctgaggcaggagaatcacttgaaaccgggaggcagaggttgcagtgagctgagattgtgccactgcactccagcctgggcaacagagcaagactccatctcaaaaaaaaaaaagaaaaaaagaaaaaaaaatgtcccagagtgggaaaaaaaagaaagaaaaaaacacagaagatcccacaggagaagatgcacatgactcccttctttgtagcattttctagttcccccgcaccgtcagtggtattatctccctcgtgcagccctggcatatctgccccacatctgagaggcatgcgcaggcccagagaggttaagggccatggccaaggtcacacagcgtgtaagaggcacagcaggaacaagaagtcgtttcttgcaactataactccagtgatgacttgcatacaaggcgtgggctcagagggtttggggaaaactttcaagaagagttgagctgggctttaaagaacggaagagccttagctatgcagaaagagaggagagaaaaagtttgtcataagcaagaatatttcagaagtctccagaccccagcagagatgccttaagcagcagcagcagcagctgagaatgcaagttctagagtccagtagacctgagatggaattgccccatcacacacctcaatgtgacctaggaagagctgtttaacccaagcctcagtttccccttctctgaaatggaaatcatcatagcacttgccttagagcaatggttcttaaaagggacccctttccagcagcaccattgctggggaatttgttagaaatgcagattcttgggccaggcacggtggctcacacctgtaatcccaacactttgggaggccaaggcaggtggatcacctaaggtcaagagttcaagaccagcctgaccaatatggtgaaaccccgtctctactaaaaatacaaaaattagccaggtgtcttggcgtgagcctgtaatcccagctactcaggaggctgagacaggagaattccttgaacccaggaggcggaggttgcagtgagcccagatcgcaccactgcactccagcctgggctacagagtgaggctatttttttttttttttttttttttttttcaaaaaaagaaatgcagattcttgctgggtgtggtggctcacgcctataatcctagcactttgggaggccaaagcaggaggatcgcttgagcctagaagttcaagaccagcctgggcaacgtagtgagaccctgtctctacaaaaacttcttaaaataactaactcttgaatttttaaagtttttaaagaaatgcagattctcaggccacagtatcagacttcctaaattggaaactgtagggtaggctcaaggagctgttttacaagatgctggcaggcactctgctttggaggcccacacccagtaggaccgttggatggagaaagaagcatcatgggcttcccaagttccagaccagcttcccaccctgtccttgtaccccttcctccaggtgcgcttcccttcccacttcagctctgacttgaaggacctgctgcggaacctcctgcaggtagatctcaccaagcgctttgggaacctcaagaatggggtcaacgatatcaagaaccacaagtggtttgccacaactgactggattgccatctaccagaggaaggtgggcctcccctccttaagcctgctgagggtttgggagcaggccaagagtcagggaggacagccaatagagaaatagagaagagaacacaggttcaggagcaacctagagtagagagcttagagcagtggggtctagaaatgggattctggggtcatttggccattccatgaccttgtgcaacagatgcctctctctgggaagtaatttcccctttgatgagttgctacattaagagtttcgggctgttaagaggaatccataacctaatggtaagcacaggcctgagtcagagtaaatatctcttgaatgttaggccattcgcatttattgttgtaataatgattatgttgaatgctgaggtctgggtgattcttgatccctctccaggtggaagctcccttcataccaaagtttaaaggccctggggatacgagtaactttgacgactatgaggaagaagaaatccgggtctccatcaatgagaagtgtggcaaggagttttctgagttttaggggcatgcctgtgcccccatgggttttcttttttcttttttcttttttttggtcgggggggtgggagggttggattgaacagccagagggccccagagttccttgcatctaatttcacccccaccccaccctccagggttagggggagcaggaagcccagataatcagagggacagaaacaccagctgctccccctcatccccttcaccctcctgccccctctcccacttttcccttcctctttccccacagccccccagcccctcagccctcccagcccacttctgcctgttttaaacgagtttctcaactccagtcagaccaggtcttgctggtgtatccagggacagggtatggaaagaggggctcacgcttaactccagcccccacccacacccccatcccacccaaccacaggccccacttgctaagggcaaatgaacgaagcgccaaccttcctttcggagtaatcctgcctgggaaggagagatttttagtgacatgttcagtgggttgcttgctagaatttttttaaaaaaacaacaatttaaaatcttatttaagttccaccagtgcctccctccctccttcctctactcccacccctcccatgtccccccattcctcaaatccattttaaagagaagcagactgactttggaaagggaggcgctggggtttgaacctccccgctgctaatctcccctgggcccctccccggggaatcctctctgccaatcctgcgagggtctaggcccctttaggaagcctccgctctctttttccccaacagacctgtcttcacccttgggctttgaaagccagacaaagcagctgcccctctccctgccaaagaggagtcatcccccaaaaagacagagggggagccccaagcccaagtctttcctcccagcagcgtttccccccaactccttaattttattctccgctagattttaacgtccagccttccctcagctgagtggggagggcatccctgcaaaagggaacagaagaggccaagtccccccaagccacggcccggggttcaaggctagagctgctggggaggggctgcctgttttactcacccaccagcttccgcctcccccatcctgggcgcccctcctccagcttagctgtcagctgtccatcacctctcccccactttctcatttgtgcttttttctctcgtaatagaaaagtggggagccgctggggagccaccccattcatccccgtatttccccctctcataacttctccccatcccaggaggagttctcaggcctggggtggggccccgggtgggtgcgggggcgattcaacctgtgtgctgcgaaggacgagacttcctcttgaacagtgtgctgttgtaaacatatttgaaaactattaccaataaagttttgtttaaaaaaaaagtgtcgctggtgttctcgacttcgatcacccacccacacacccccagggggttggaaagggaatttcggaccccagcgtgcaggccgatcaggtcctggcttgaagtccttgtaaccagggtttagctgaaattccggcactccttcggccccgcaggagaaacgagcgtcaaactgccctttgaccccagattcggggtccccaaatctgcggcgcgccccctcggcgtccagcccgggaccgagagggcgctctagggaggcgctggggctggcgcgccaggaggccgagcggcggcgggggcggccctggcagggggagtagaagggggagagggtgcgcgccccccttcccgcatcctcagcgccgggccaggcgcgcctgagggacgcgggggcggcggcagcaggagggtccccgcagcaccctgcgagcgcggcagccccggcccgcgggcggcgagttcccggtaagtgcggtcccgagagcggagcgcgctggagaggcgtggagaggggggctgggcgccggggacgtctgggtcccgcgcccaatggctggagggcggccgagcgccgcccgcccgccctgcccgcccc

SEQ ID NO: 640 - protein, 435 aa, Homo sapiens
MEMEKEFEQIDKSGSWAAIYQDIRHEASDFPCRVAKLPKNKNRNRYRDVSPFDHSRIKLHQEDNDYINASLIKMEEAQRSYILTQGPLPNTCGHFWEMVWEQKSRGVVMLNRVMEKGSLKCAQYWPQKEEKEMIFEDTNLKLTLISEDIKSYYTVRQLELENLTTQETREILHFHYTTWPDFGVPESPASFLNFLFKVRESGSLSPEHGPVVVHCSAGIGRSGTFCLADTCLLLMDKRKDPSSVDIKKVLLEMRKFRMGLIQTADQLRFSYLAVIEGAKFIMGDSSVQDQWKELSHEDLEPPPEHIPPPPRPPKRILEPHNGKCREFFPNHQWVKEETQEDKDCPIKEEKGSPLNAAPYGIESMSQDTEVRSRVVGGSLRGAQAASPAKGEPSLPEKDEDHALSYWKPFLVNMCVATVLTAGAYLCYRFLFNSNT

SEQ ID NO: 641 - DNA, 1308 bp, Homo sapiens
  source 1..1308: mol_type = genomic DNA
atggagatggaaaaggagttcgagcagatcgacaagtccgggagctgggcggccatttaccaggatatccgacatgaagccagtgacttcccatgtagagtggccaagcttcctaagaacaaaaaccgaaataggtacagagacgtcagtccctttgaccatagtcggattaaactacatcaagaagataatgactatatcaacgctagtttgataaaaatggaagaagcccaaaggagttacattcttacccagggccctttgcctaacacatgcggtcacttttgggagatggtgtgggagcagaaaagcaggggtgtcgtcatgctcaacagagtgatggagaaaggttcgttaaaatgcgcacaatactggccacaaaaagaagaaaaagagatgatctttgaagacacaaatttgaaattaacattgatctctgaagatatcaagtcatattatacagtgcgacagctagaattggaaaaccttacaacccaagaaactcgagagatcttacatttccactataccacatggcctgactttggagtccctgaatcaccagcctcattcttgaactttcttttcaaagtccgagagtcagggtcactcagcccggagcacgggcccgttgtggtgcactgcagtgcaggcatcggcaggtctggaaccttctgtctggctgatacctgcctcttgctgatggacaagaggaaagacccttcttccgttgatatcaagaaagtgctgttagaaatgaggaagtttcggatggggctgatccagacagccgaccagctgcgcttctcctacctggctgtgatcgaaggtgccaaattcatcatgggggactcttccgtgcaggatcagtggaaggagctttcccacgaggacctggagcccccacccgagcatatccccccacctccccggccacccaaacgaatcctggagccacacaatgggaaatgcagggagttcttcccaaatcaccagtgggtgaaggaagagacccaggaggataaagactgccccatcaaggaagaaaaaggaagccccttaaatgccgcaccctacggcatcgaaagcatgagtcaagacactgaagttagaagtcgggtcgtggggggaagtcttcgaggtgcccaggctgcctccccagccaaaggggagccgtcactgcccgagaaggacgaggaccatgcactgagttactggaagcccttcctggtcaacatgtgcgtggctacggtcctcacggccggcgcttacctctgctacaggttcctgttcaacagcaacacatag

SEQ ID NO: 642 - DNA, 32707 bp, Homo sapiens
  source 1..32707: mol_type = genomic DNA
tgcaccatggaatttgtgctctgcttagttcagtctgagcaggagttccttgatacttcgggaaacactgaaaatcattccatccccatccattcattcctgcagcacccaagtggaaattctgcgtttcagacagggacactacccttagagagcagtgggcttccccagcagcgtagtgaaacatgatactcctgagtttcatgaaaaaagggcagacatctggccagagctgggaggcaggaaatagagcacggtgccctcctcccatactccagcttggattactgaggctggggcccaggccctgcaggaaaggaggtgcatgactactttaaggccactcactctgtgactcaacgggccgggtcggggctggaactcaatgccctcccgggcctggagagcccacgcgccgtgggcggggctcccggggtcgcctaggcaacaggcgcgcgccgcgcccgagcccagagccccaaagcggaggagggaacgcgcgctattagatatctcgcggtgctggggccacttcccctagcaccgcccccggctcctccccgcggaagtgcttgtcgaaattctcgatcgctgattggtccttctgcttcaggggcggagcccctggcaggcgtgatgcgtagttccggctgccggttgacatgaagaagcagcagcggctagggcggcggtagctgcaggggtcggggattgcagcgggcctcggggctaagagcgcgacgcggcctagagcggcagacggcgcagtgggccgagaaggaggcgcagcagccgccctggcccgtcatggagatggaaaaggagttcgagcagatcgacaagtccgggagctgggcggccatttaccaggtgcgggagcgccccggagcgtggcgggcccttcgcttaggccgcttgaacatcccctcagacctccaggccccagactccctctgggtcttgccctctgcctcgctcctactgcttgaggattcgatgggacagcgacgcactgcgtccccccaccctttgtccccggggcgggcgtgtttctcgccgcagcgtcggagcccccttcgatcccccacctcccttctgttctccagctcgggtgatctctcaagccgggggaccgccggtctgtgctctcaacgcgaatccctcgcaccccgaccccgccccctgcctgtccactctttgtcccctggggtgatttagcacccccactatttccttttctggagtggaccacctcagactctcttcctttgtctccctgggggaaaaggttactccccccgtccctccttcacatttcctttcccctagtctcagtgtgcgtcgagtcccagagatgacagtcccctttcccctttctgttcattcatttattggataggagttggcaagcttattctgtgctaggcaccgcttaggcattggaggtggtgtttgctaatcaggacaggcaagatcctagccttagtggggcctagagtcgaatagggcaatcaaacacaaaagcaaataatttcagatagtgacaggtgctgtgaagagaacgacttcctaacggggtacagggtgactgcatagaaggccggctgtcttagagaaggggatcagggaaggcctgtcaaaggaggagacatttgctttgtgagctgaaccaagaggagcagaaagccgtgagaatatggggctaaagaaccttctagccaggaggcctgcggtacccactccattggggccatgatattattctttcaggcagggactcaggaaggttaacgttttaaccctctctaaaatagcatctttcctcaatgagcagcttagtctttggtcgtggcagagatgaccttgtcttaggagtcatctccttgtgtgttaaaaagttaggaaaggagggtttctcatatatctataaaacaagtagttaaaaacacaaagagctcttcctttcacaagcagctgaataagatacatactcccaattaaatgtcattgcgggggttgttaagattaactaaaaccacacttgcacagtatcttaaataagcgatatacagaatagagagattttgttacttgtgtaaagggagacagcagatgattctgttttcagcttataggctcaaaaggcaaattgtgagatccatcagctgtagtattaaaatctattttgagctccgcttagaaaggaaaaaaggtttaagcagttctttggtatgcttgactaacaaaagcctttttttttggcagccttgattttcatgtggatttacatcaagcttatttgacaggattctttttatttggactgtagtgtgtatattagtttctgctagactaatatttctaaccactgtaatctatatactaataagtatgattgatcagtatataaaatttgtatgccatatctggtctctgaattagctgaatgaattccataagggactttgagactgtgtagacaaattttctgcatcagtttaatgcagtagagtctaaaatgtctttaaatgaaaattgttggtctgaagtgttggagttgattatgatacaccccatcacagtggaagcattgtggagagaagtcttttccactgaaattgactgagttgacaacaagaaatacgtattgtaacttagttcttagttgaattttatttcttacaattttaagccagagtgggttgacctgtcacccaagcatggttaaaattgtattcagcatgcaactagcatggagtgtgtcagtcttcaattcatttccttcattgttcttaagtttttctgccacaattaaaccccacaagttagtcaaggtgttgagattttcactgcttcttaatggattgccacattccctgaggtagtttcttttggtcttagagaattgtcagggccagcttttctcacctccactgtatggatatttttcttttctaagatcttgaaatcagaagcttttctcctaagtgtaaaagtagctctttgtcatacaactgtagcgttttctgaaacagagttcagatgaccttgagtctaaagtggctaactttccaaggtgtgtatcgctttaccaaaaccattatttttcaaggattcaaagaatgtgtttacaattgatagaaaatggaagtttaaaaaaattaatactttatagcatgttgaaatgagggcagccttatacaaagtcatactttgagcttgcctagcctattgtgatcagagaataatgtaatttttgcttacaacttggtaagcaggtcagttattctaacttattttctgattagaacaaaaagatgtaaaaacttgaaaactattgggaaaagaacaaagagtgaagaggacttttgagtgctgaggaatgtggcagcttggaaaacaaactttttaggcagagattctttgctaggtcagtttgataaagtgagcataaccgtatttttaatctttaatgctaatgaatagcatagatgctaataagcatctaggtctataaaaagtcagctttgatagtgtatatagatggctttaaacattgttttctagcatttaaacactttcaaatcatccggttgcttgattgggcctagctgtctaagaggagagaatgagcccagatgaggaaaagagattgattttactgagctagaatgagaggagagagggttgagtgaatgaaaagaatagctcatgtgctcccctccatctgtagtttaagaggggttgggtccggtgttttgcttgttttctcgtctgtaaattctttgattctctgacaccactcactatatttcattgtgaatgatttgattgtttcagataaaggggactgcaataataccttgtgacatgaaggcaagatttattcatgttagaggcaggctttgtaaaatgggccactcttccaattgacatttgtttttatagctgttttcattatgaaatacaatctaatgcctgactaggttaaaaccatgttgtaacaatagttcactaaaattccttactgatatacagcttatgttgttatattccaaaaagatgaatattaaaatttgccaataatgtttatttaaatactattttcttcagaggaaaaaaaactattttatgcaaaggagaaagatctatacactatgactcacttcacttaaaaaaaaaaagactaacggaaatgacatggagagactgggaagttctagtcatcttgagtgacccattagatctaaatgttcttgtttagccctggtttgagtgaactaaatttaggtgtctgatcagtactttggaaatggtgtaaatgcctttgtaattgtctggactgatattagattaactgggagcacaagtagaaatagtgaaggaaagaactttttgctattgttatttgacatcactggcatatttataggaatactttggtgtttttggaagtaagtaaaccaaccagtggttctaaaaagtcagctgggggataatggtaatgccgctgtttcttagctgcaagttatctgccgttacttctcctccattttgcattttatcttgaatagctcctcaaaacctattaaaatacctggtattgaataatgtaattgaatgtgtactgaatttcacagtggaaatgaataagaaatttcctgtggaggttttttgacttagctactgaaataacggccttttgttgtgtgattctttcccttttctctttgttaaagaaaactgtcttgtgatcttgtagattacagaatccttttggcaatttctgttcctagcactgctttttctttctttctttcttttaaatagaaatggggttttgctgtgttgcccaggttggtcttgaactcctggcttcaagcgatcctcccaccttggcctcctgaagttgggattgcaggcgtgagcaggtactttttctgaggcctgcctgagcctatatatattttgcacaatttggcattcctccctacagtgtttatgctgatttgtttctggtaacaactaatactggcaaatcggctgggcatgttactttatgctgcccatattcaggaaaattggaattctagctgggtcattgttcccagatgatgtagtttggcaccagccattccatgttcacattttgagtatccaggagggctggggactttggagtagttggtgattccctctgccacatttcactggttggtcactatggcatcctttccaccacactagtagtctaggttctcagatgttgcttatgagcctgcaatggtttctagtttcacactgcagaaatgagtgaagccggttacccgttaatatggtcccatcatcactagagtaattcattgttctaaaaccagatctgagtctctcactcctctgcaactacttctgattctttcataacacttgtaaagtccaaactcctctttagcatggcagccagcttccagtccttccctcctatgtggcttccattctagccagacaagaaagggcagcgttctccaaactcatcctcgcccttcattcctctataccattgctgagcactttgttgaggatgcctctcccgttcaatctagcttgcatcttccagctcgaatgtgtgcttccttgcaccagagttttgttccgtcacctgtgtgttttcatacaagctggcacatatctcttctaaagccctgctgtcattgtagctgcgtctttacaaacattttttttttaaatttttataaagtcaaggtctcactatattgcccaggctggtctcaaactcctgggctcaagtgatcctcctgccttggcctcccagagtgctgggattataggtatgagacactgtgcccagctgtagctgctactttatatcccaggtctatctccaatggagcccaagcttcctgaggccacctgttgtatctttctcattcatcttgaagtcctctgctcctggcacagagtaggtacctaacaagagttgggattgaattgatggtcagtactttgctagcctgatggtataaagatgtacaaaacatgttcctggctcccactctaggggggcaatgatggaaacaaatagattagcccacattagtaccaatagtagaggtcactctgggagaaggcccccaccacattttgagtcatggcctaatgaggtaatttagtattgcctgctgcagtggctttggaagaaaggctggcattcttagccagtagaagctgataccactgatttgtttcacagaagctttaaatataacaataaatttgtgcttggcctacggtgaactttacaggcaacttggaggtaatatgtttgtctctctaagaattgttgaattcctcttccctcatccctcctgactggttctcacaagcctagcgggcctttgcatgtggttggttcataaaatactttttgattttgggatataaaatatagttctccataaaataacgactgttaccaagtctttgattttttttttcaaactataaatggtaatgacattctttggcctttgatcagaccacccttaggggcaagagagtagtttcatgttttgctttttctagtgtcccctgtgtctgggtatagttgcagtctcagctgtcatactaacagtgctgagtgagtcccttactttctttgggttttggtttctcccttgtaaaaatgatcctggactaactgatcattaagttcaggtcaagtaataaaaatccttaatgtactcacaaatacaatttaatgttcctgaataatccttgtaaaaactgcagcagttactcagttttgtaaggtgtggttgggtactattaggctcaaaagtttataggagctttgtgagtatagttaacaactcaaaagaatggggtgttttttcccgaggggcatgaaatgtttttgataaatagagttcatttgacttggtaatgtggaaaatgagtagccctgacacgtacgctatgcttttgcagtttttctctcaagtagcaattgggtggcttttcctgtaaaagatagaggaactgattcttgagaatttacgaaagcttcaaccctaactaggtatgcaaagaatagttgccctttatgttgtaattttaggaagaaacctacatctggtctaagtttcatttgaataatatgatagtttacacatctgccatatttgagaagaaagtacctaagtctccagcattttagaaataatgctttactttgtgtagaaatggtctttagagtttaatagctgctgccctctcctttttcaaagcagcttgacataatcatgagtatcttgctgacagcttgtaaattttgattgtatgaaaactgaaaataagaccatttcacatggaagattccctcctgccctgaaacagccaaagaaaactgtagccatcaaatctattgatctctgggctttggtacaagtcacactactacaaataaaataataccaagtacttataaatgattttcagtccttttaaagtttatttttttaatattttttttgagatggggtcttgctgtgtcgtccaggctggagtgcagtggcacaatcttggctcactgcaacctccacctcctgggctcaagtgatcctcccacctcaggctcccaagtagctgagactacaggcatgtgccatcacgcccagctaatttttgtatttttttggagtagagatgggattttgctgtgttgcccaggctggtcttgaactcctgggcttaagccatctgtctgcctcaggctcccaaagtgttgggattacaggtgtgagccactgtgcccggcccagccctttttttaagagaaaaacgtatgacatcgttcgatttactgagtgcttatggttttactaaggcagtaaggttttatggataccctatggtaattagatagaattagtgctctgaagtcagctctgtaatatggactcagagtaaacatggcaaagggacacttaaggtctgcattttctctgggaaataaacgtattctttactactctgaatctagtgctgggaaattctaaatccttcttgaggattaaccacttgaagtaaagttttgggtcccaagtaggcttgtgtccctgtctccttctctttacttttcagatgtttcttcctagagactgaggtatattttacttttacagatgaagaaggaagcctcggctgtgtttgtggcttttgtgggtgagcaacatcacttgcaaagataagatgagcatagcaaaactaggctttcaaaataatttttaaaaatttcttagtgattagaaaaggaaaactcttcccttgtctctgttaagaaacgtttttcgacttttttcctttcttaatggatcttttattggcacttctcttccttttgcagaatcttacttaaaagtcactacgttacattacagcaaacagcttagctaatttttatccagatgggccccggttacaggattgtacactattgcgaatttcttacaggaaagtgaacatcaagtaattattccaaatagagttctcttaagaacgtgagttacttaaaaatgtctaaggatgaagtcacttctgaatataacttcactcaagagaacaaataagcaaactgcatttagcataacatggtaaattagctttaactctccttgatgtttgaacatttgtcgctgttaactactgtttcacttttcaaatagtcagggcttagtttgcttctgtaaggataaagggaaaatacgccttcactgagtcataaatatttttgtggctaacttttgcacagagaaaagaggcctctaagaaggtacccagtgaatttttttttcggggcagggagagaatatgtcattttttggtttgttgttgttgttgtcattgttttgctttgttgtttttactctgaactgaactgtatcttgacagcacttttgaattaagagcattactcttattgttctctactacctggacgccacctccctgttgccatagtgttaaggatcatgctccgaggtggggtgaggcagaatggggccaagatcagaaagttacattaagctacatcaggtttatacaagcataaaaccaaatttttggagcagtccccagaatacaacctggtttagccacacctaaaggttgctcttgaatattccttgagaatccacatccctagaatgctgggtttcaatgggccctttatgtacctatcatggtgtcatttctgagcatttctaaatattccttcatgtcttactgacagtttttcttgaataaatcttaggaatattagtgccattatcagtattttgtttggtctgttcacaccacaaataactacccaggtctgctacttgcccctatttctctacctgctaatgaaaatgcttttgaaagtttgagtaacagtattggagtgtgcacagtggtattggtaggttctgtactcatccttaaccacttgttttcatcctttgtgagcttgaagtttctccaaaaaatttatcacaaaacttatcagacatagttaatacactcagagagagaatcactgaaaaagtagatgtagtttaacaaacccagtgccttttttttacccatgaatacatatttgtcaactaaacctcattttgcaacttgttccactactcgaatggtaacaaacttttggtttcccaatagatttggaagatgttgcttttgaaagtaggaaatagatggctttagaagatggaagaatattttgtttgaagtgggagcgtggtatgtccttagctgtctgtgaaatgcagctgaagatgggtgtgggccttcatctgcatttcccatcttcagtttgaggaggtagttacccttctaaccacttaagaactgcatggtacatgctgttttatttacagggcaaaactgtgctcccgtagtttccctggtgcttgccttcacgttaacacagtgtcatcgtttggcagtgtttatgtgccagggtccatgttagaaggaggaaaggtatagcgaagttaaagggtgcagttggcctcccacctttagttttgtaagtgcctttaaagtttgatttttgtaggttgatcataaggaagtgataagtatgttaggttatttgtggtttgagctaattttagtctctttttacagcttgctttgtatcctttgccattaaaacatgctttctagaaagacaacttttgaatgtaggacacagtctatattctatacttggctacatttcaaaaaatattttctcagtactttggaagttggacagttggaagcatagtgacagtatttaaaaatctttgattccggccgggcatggtggctcacgcctgtaatcccagcactttgggaggccgaggtgggtggatcacttgaggtccggagttcaggaccagcctgaccaacatggtgaaaccctgtctctactaaaaatacaaaattagccgagcgtggtggtacatgcctgtaatcccagctactcaggaggctgaggcaggagaatcgcttgaatctgggaggcggaggttgcattgagccgagatcataccattgcactacagcctgggggacaagagtgaaactctgtctcaaaaaaaaaaaaaaaattaagtgatttctttgctttgtgacacttctacttttccagcaagtaaattatattctttcatacaggtatgaaattcttgttccaagctagtggttaaaaaggcacagttgatattagaggatttgtaaaagattatgaccacgcctgcaatgtactgaagcaaggctttgctgggctgtgtataggaaaccttccccagcctgtgcccttgcttgatagaacattttgctcctaagggtaggtgcctgtatctgtctccagtactggttagtttcacacagaacagttgtgtttcagagctttagtctcaagctgccctgctcccctgaagcagccaccctgagcatgtgcactcacaggaggggacatgtgaggtcatggaagaagacgactcaggaagaagaagacttgggtttgggttctgactctgcctttgactgttgtgggattttgaggagttgcatacaggatctgtaaaatgtagtcattagactagactagacagccatatagcattacctagatgtaactttctacaaagacatggtcacaggagaagaccagagggtggggtgatctttctggaaaaattggggcttcatgccttactcatgctagatatggtagcattatatggctgtgcctgatccccctaatctaaaagtgggacagaactttaaaatttcatattaactcaaattaaaacttgaaaaaaacccattatttccttaaaaataataaaatgccctgtgggggcataagtcacattatattttaaaattcctgaatgccacatggatgaatgtagttccttttgaaattcttcttttgtctaaagaggaatgttggattttgtaattggactaaaaaatcttccatttgagagagaaacagtctgctgcatgttctacccttgttcaggataaaacccactaatagctaacatttattgaattctgtgttgtgcctcaggcactgtgcaaagtcctttacatgcaatgctgtttattatatactgtcaattggtctataacagcaggaaatgtttcaggaggacaatgaggtcccagaccctcagtcttctcctgtgtcctggattcagcttcacaatagcactatggcagtgtggccactgcttcagcttccacatacatggctgtgaagagagacaggggattgtgctaagcctccccgatttattaggacataggaggagagagtttgtagtttttgacctttgcctagttttctaacctctttcctagatgtcacaaattggccacccacagtcatattttgcttgcttcacgcaatgctttttaaaaaagagaagagtttaatttgtgccattgtttataaatgaatcaggagaaatgacatgcaactctggattctggcctctcttgaaaaatctgaaaatcacaccgtctgagcttacactggcagtggtctgctggactgagggacacaactccttttggatgtacatgtgtgcgttgcagagtttaccacagtcccacagtgggtcacactgtccttgtcggtgtacactacctagcacttgagtttgcaacccctaccccaagctgagttttctcgtcaagcttgatgttaatgttatgtgatgcttggccttgtaggtatttggtatattatcgttagataaaattgaagcaaagggctaaagggttggtggcctgagggagtgcccttgacagtaaagtctaggataaaatcattggccaggtactccttcccttcccgcccttcctcttttctctttatcctcagcctccttctgctattttgaggaagttagaagccaccaccattttttcccacctcaggcaactgagtgtggctgtatttctgtcccatgttcagttatttccaggaactatttttgatgaccaacttgaagttacattgggtgggcctaatgggggctgataaaagaatgaggtgaccaaatatgcttgcactgagacggctacgaagtaaggtttttaatgacttgctttgtgacttggtcaggagtgataccatttgtcatgtgtccaacttcatgactaaatggttgctctaccttatcctcatagctataataaaataaaataaatacatacattgcagggaggaatgtatcttgttaaaggtctctcccttttagcaacaaaagtacatattatgttgtagaacatgctttttctttgatccttcttgaacacctattactctatagaggtatgttgtgtatggcaaattagaacaagcaatagataaggatgattctttaccattataacccagtcaaggtctttgtcctaagttttgtacctttctccagagggaaaggtatttgtatttatttatttatttttgaggcagagttttgctcttgttgcccaggctggggtgcaatggcacgatctcagctcactgtaacatccgcctcccgagttcaagtgattctcctgcctcagcctcccgagtagctgggattacaggtgcctgccacgatgcccggctaatttttttttttttttttgtatttttagtagagatggggtttcatcatgttggccaggctggtcttgaactcctgacctcaggtgatccatccacctcggcctcccaaagtgttgggattacaggcatcagccactgcctccggccaggtatttgtatttttagtctctatgccttaccgtctcagatcaggaggatttggtgatttatcgaatgtgggggaaggggaagaagaggaaacgggaggaatgttccagattagggaaatagctagatggaagatgcagcccctcatcaaggtggggacacaggaaaaggaacgtgtgcaaagaagatggtgatctggttgtgaccatgttgttagaggacgtccagggaagcatctggtaggtggtggggtgtttaaatatagaacattcggagaatgctccgaagcttcagagaacccttcccaaaaggacaaaaccagctcagtgttttagcactccgggatcatatggcatgacagcatggctgctttatacttttttgtgtatgtgaaattaaaaccaaccactcaggaccaatttctctgaagctttttgtcaatctttcatttgcttttctcgtctagattgtaagctccttgcagccagtgtctgttgattcagtcattcaaaaaataatacatgaacagctactaggtaccaggctctgtgctgggcagttgggatatgtggtgaggaagacaaacttggtccctgcccttaggaagttcagtagtccagcagacaaagtggctgaataaagataatctcagttcacagtgataagagctcttacaggcctaggctccaggtgctgtggggatgctcaggaaaaggtatctaattgggattgggagcaggcaaaacaaataaaggatagtgtataaaggtaatatctagttgaagttctgaagggcaaggaggagtgagcctgtatattctctgagtctctccctaatctgggattgacttcttgtccgtctctgttcatattaagtgtcacctaggcttgaaagggtgagatcatatttcacttccttcctctttggtcttaacctttctctgctaccccctcacacaatgcatatgcattattctcttattgtatatatttttcctctcttccttttcatgtttcctctgccattacttttaacctcgactgccatatggcctctaaacgcttccagaagggtagcctagtggaggttattccatcatggccttgagctcatgcgaccagatagtgaaggcatctgtgtaggtgtcttctccaggagggtgatatttgtttcattgtaaattttgtagccctagaacaccaacaacagtgcacagtaattagtaggcaggcagtacaggattcattgaagtgaagtgataacttttatccaagtatgtatgcagataatctttgatttgtacaaaaaaaattatattttaatatgtaaagattttttaaaagaatcttcaagttttagccttcccactaggaatatattgaaaacatgtgcctagttcactgacttgcagctgccactatgagaataaaggtctcatttagttgttgtgaattttaagggatattttcaatgatgttggctggtttatcccattatgtggtctttttttttttttttttttttttttgaggtggagtctcgctctgtcacccaggctggagtgcagtggcgcaatctcgactcactgcaacctccgcctcccgggttcaagcgattctgctgtctcagcctcctaagtagctgggattacaggcgcctgccactacgcccagctaatttttggtatttttggtagagaagggtttcaccatgttggtcaggctggtctcgaactcctgacctcatgatccactcacttcagcctcccaaagtgctgggattacaggcgtgagccaccatgcccagcctatgtgctcttattagcaattctcagtacacagatagctttgagtgattctttcaagtcaagtaccttattaaaaaactcaagtgtactgataattatcttacttttaaatggctaagtgataagactgaatttttaggtactgtaacacttcagattacagattctgatatttttatggttatttatatttatttatttttgagatggagttttgctcttgctgcctaggctggagtgcaatggcacgatctcggctcactgcaacctccgcctcccaggttcaagcgattctcctgcctcagcctcctgagtagctgggattacagtcacccgccactacagccggctaatttttgttatttttaatagagacaatgtttcaccatgttggccagggtggtctcgcacttctgacctctggcgatccgcccgcctcggcctcccaaagtgctgggattacaggcgtgagccaccgcacctggcctggttacttaaatttaaatacaaaaattatgttgattaattctgaatgatttcctgattgctccccgtttaccattcacacatttattaaattcttcgcttgccatatagaagcagtctctctgccatatatgccatatagataacagaactagctgtctgcaaaccactgaaattgtgaaaacatctccccttttttcctgtttctaattctagctatgaggattatatacagaagtagtcctggatttgatttttttttttttttgatgattgttttttgatagttgttgactacaaatcatttaaacgtctgaaaggggaaaggttttccttaaaaatggatgacaaaggagaataaaaaggtattttgactatttttttgaatgatgagttttttttttctctttcttgttttcttttggagtcatttatgtgtcactgagtggataccatggaacatgtggcagaagtagatatatggggtaaaagaaccatagttcataagctccttgacagaatcactgaagtgtagccgttatatggccactgtcgcagggggaggcagcagttttgaagaaggggatgagtaataatgagtgataaaaaggcatcctggatagaagaccaaactctgcagaagaccccagtttgattatgcttttgttttctgatttgcggaggagagtgaaaatgcctgaggggtgcgggggagcacatagggtgtatgtgtgtgtgtgtgcgcgtgcagattctctctttcactgtatgtatttgtatgcatgtatgtatcttaggacttaagctttctagtcaataaattgccatagtggggaattgcttaattgcttgccttctgttgttgtatttaatttaattttatttttaatgatttttttggtggggtacagggtcttaactatgttgtccaggctggtcttgaactcctaaactcaagtgatcctcccgcctcgggctcccaaaatgctgggattacaggtgtgagccaccatgcccagcttagttgtattttaaatgggcctgtttgcagcattccctactccccttagtttacctggctcacaacctgtctttccatatcaaggcttctgtcacccctggcccatgtcagtgcatttgggcagcccacccagcatcatcacctcatgtcccagggaacttcctgttcctctcttccagctatttccttccctggcagttgagatagtctctacctttgacctactgttaagctcagaccttctgctctctagttacagcctctgtgctgccagattccctcgctcagttgctttctctagtttgggttttctcctttattcagatttccagctgtttctctcctccccccaccgcagcctcctcacttccctccttatgcatctgagactgtggtcagtcactttagatgctgcctctccactgtacttgtgtccatcttcttacctaccacctctagccctggagcaggctcttcccctgtctttgtcttcctgggcccaggctcctaagcgctgctggaaaaaaaatcccccagtattgagcccctagaaatccagtctttaatcccaaatctgtctcccccagcatctggccatcagatctaaagcttacctgccatcctttccacctcatttctctcacaggggaaaaggagcctttgctcctagagtctgcgctcctgaccccttcccatctcacctgttcaaggcatcttgcaataaggggttggtgactctcgaggaatggatcccaggccctccctattatcatcttatgtatgccagttcaacgttctcagcttcctccagccgagacggcccctccagccactgctttatactctccttctctggttgaaatttttgaagtaaataggtcactctgcccatcgttcatcttccagtcactctgtgtgtttatcttccagggaagtgaggctctatgctaccaagccactgaaataatttttttttttttccagactgagtcttgctctgtcacccaggctggagtgcagtgccgcagtcttggctcactgcaacctctgcctcccggcttcaggcgattctcctgccccagcctcctgagtagctgggattacaggtgcctgtcatcacgcctggctaattttttgtatttttggtagagatggggcttcaccatgttggccaggcttgttggcatgttgaccatgttggccaggctagcctcaagtgatccacccgtcagcctcccaaagtgctgagattacaggtgtgagccaccgcacctggcctgaaataattcttgacaagatctgcttccttgttactaatacagtggatattttgcatcctaattttaatgcagttcagtgtggtagacctgtatttgcatattgaatattcccttccctgttttaataactctattttttccttttcttttatatctcctgcttctctagctagtcctagaccttactcatcggtgtcttctctgtttgttcctcaacttgaggagttcctacagggtttacccaatctgctgctttcatttagcccttttgttctttttgagccatctcattcactcacccaggatgtagcatcggcccttgaattcagtgtgcacacatacactgtgcactatgggacagccttcagaggcactttgttcctgaaattgtggtggtctttgcctctcatggagccttgcatatgctgtttcctctgcctggaatatcctaccttttacttaactgattctcgttcttctttccagtcacattttgtacatttcttctgggaagctttctctgatttcccctttccacaggtccaagttaactgccttgtctaggtcctcccatggccctctgaaggcctcctttcatagcaccatgtctgagtatactgtaataacacgcattgctctgtaatagcctgtttacttacctattgccaagtaatctatcaagtcttataaagggcggggctgcttttgttctagtcatttgtatctcttagtacccaatatagtgtttggcatatagaaaatacccaacaaggccagtcgcagtggctcatacctgtaatccgagcactttggtaggctgaggtgggcggatcacttgaggtcaggagtttgagaccagcctggccaacatggtgaaaccctgtctctactaaaaatacaaaaattagccaggcgtggtggcgggtgcctgtagtcccagctacttgggaggctgaggcaggagaatcacttgaactggggaggtggaggttgcagtgagctgagatcactccactgcactccagcctgggtgacagagtgagactccatcttaaaaaaaaaaaagactccatcttaaaaaaaaaaaaaaagaaaaaagaaagaaaatacccaataagtagttcctgaatgaatagatgagaatgctgtttagaaggttcatgaattggaaaccgtgattgctagggaggctttgagttgatggtattgtgttgaaccatgtgttacccaggatcaatttagattttacactttgttttctctgttcctttttatagtaattttctgtatgtggtgttttccccccatgagattgtataccatttctcagcgagaactgtgtgtaatgcttggtggctccctcatggtgccttgcatggaattggacttcgtttcagtggatctgatcccagttatgttaatgctcgatggagctaagtcttatctcgaagcagtccatgtcttcatcagctggccctgcctccatgccctgcacagaccatgccactctggagaggtagtttccctgtggcttattagtcttatgttccagtgtgctggccaagtatgagagacatcagtggtatgagagagtctctctcattcaaacttcgtaggttttgtagctgggactgaccagtgctgacaggaaatagaggcatttattaaaagccagagatttttcaagttgcaggaagcaaagctcttgttagctatgattttgtggtgggtttggtagtccaatataaaagtaaaaactggatgacaatgggaggagcatgcttgggtctccaaagttagatcatttttcctaagtaatttgtctttaaacttttactggtttggaatttcctgagattttgatcttgccagaaagtttatagcaaaagttctgagcagatgacacttttgcgtctgaaaccaaatcattgtttttgtttttaacttttttcttaatatattatccttagttcagccctgaagattattctgttatttgtggatctcaactttccccccatctcctggatctttgtgaaatgaatggtattaattgaatagagaaggaagatataaacataaacttagtcaaaaacttgttcttgactaggcaagttgggctttatagctttgagctgatgacatgtctattcttgtgaaaaagggatttttagtgttggtttggcttcttgttatatttgatttattattattatcattatcattatttttgagacagagtcttgctctgtcgcccaggctggagtgcagtggctcaatctcggctcagtgcaacctccgcctcccaggttcaagcgattctcgtgcctcagcctctggagtagctgggattacaggcgggtgccactacacctggctaatatttgtatttttagtagagacaggtttcaccatgttggctaggctggtcttgaactcctgacctcaggtgatccacctgccttggcctcccaaagtgctgggattacaggccttagccactgtgcctggctgattttttttttttttttttttttaggtttgttttaactggaactttacgtgaatgtaattgaatttagaataaaagcacttaatttcacagtgtgcagtgaactttctgttacttattttaacagtaaaaccccttgcagtaaatgacttggagcaaagattgcttttttaaaaaatgttttaatttgtttttcttttcttgagatggagtcttgctctgtcaccaggctggagtatggtggcgcgatcttggctcactgcagcctccccgcctcctaggttcaagcgaatctcctgcctcagcctcctgagtagctgggactacaggcacatgccaccatgcccagctaatttttgtatttttagtagagacagggtttcaccatgttggtcaggatggtcttgatctcttgaccccgtgatccaccctcctcggcctcccaaagtgctgggattacaactgctgggattacaagtgctgggattacaagcgtgagccaccacgcctggccaattttttttttttttttctttttgagacagagtttcactctgtcacccaggctggagtgcagtgtcacagtcaaaactcactggcagccttaacctcctgggctcgaatgatcctcctgcctcagcctcccaagtaactgagactacaggcatgtaccactgtgcccagctaattgtttttttattttttattttttgtagggacagggtctcgctattttgcccaggctagtctacaactcttgggctcaagcagtcctcctgccttgacctcccaaaatgttgggattacagggacaagccactgcacctggccaaggattgttttttaagtgaactgagacccagccttattagtggtcccagagcagacctgggacctgaagggaacccttttcttctggtccagcgtctttcctctgatgggctactttcctggagcctttgattgcctgtcatcagagtaactgagtttgaacagagtaggtagttcctctccagaccaccacactcaccagctttcattctgcttctctcgtttagactgtggttctgaatcctcagttctatttactgagtgtttttaaacataaaaatgccttttaatgagattgaaggccagaggtgggacagttgaggacaaagtagaaataaaaccttcaaggcggggttgttggtgggagtctttttttgtttgtttgttttttgagactgagtctcgctctgtcacccaggctggagtgcagtggcacaatctcagctcactgcaacctccgcctcccgagttcaagctattctcctgcctcagcctccttagtagctgggatttcaggctcccgccaccatgcccagctaatttttgtatttttggtagaaacggggtttcaccatgttggccaggctggtctcaaactcctgacctcaggtgatctgtctgcctcagcctcccaaagtgctgggattacaggcgtgagccactgtgcctggcagggagtcttatagaagctgtcgtggacaatgtgggaagtagtgagcctttgtattccagtatgctgggctccactgtgcttgctctggcccccggtcgctctctgtgtgttattgagtccccatccacggccatactcttcgtcctgcttctctccttaccatcctctccccgctagtggtaccacggctaccactagcaattactgacatgtgggatcttagggctacttccctataaggctgcagggcatgtggtgttggctacgcgcatggtaaccatggtagccctgtggttctccacatgtgcgccttgtgacctgggattggctgcagactagtaataaactgcgtcttctggtatggaatctgtctgtagttgtactttctacctctgtatttaaggggagatctgtaacctaccaatgccagttgaagaggatggatgatagagatgttaacaaacagctgaaaaactaactacaatggcctgcaaaatagaacagcaggtttttgtggcaaaactttgtgtccatgagtttgttttttaaatatcctcatataatctgttttaaatcgagaggctttgggtaaaagccatggctagtcttacatgtcatggagtacctagcttgtgaggttcacagtttattatttacagagtgtccccttaaatcttctttgggtcggttcagcgaatgttgctcagatggacttttttggctgacatagagtcaaaatggtaatcaagcatgaaagtacagacagtccttaacgcacaaatgtgtcatgcttgaaaagttggaaagttggttctctggagctctgattgtattgtcctgtagaatccgtgttgtgaatggtggttaaatcccaaatgagtccgtagaacctatataatctgcaatatacctgcagtattccaattaatatgtaattcccccatagaactatgttaatgatttgtatgtatggtatttaatattatacataataatgattgtatgaataaaaaacattctgggctccatgtggatgatggggtgtgtgtgtgtgtctgtctatgtgtgggtgggtgtgtgttcatagatcccttttcctgcaatcctggcactggaattggttttatcatttccaattaagtttcattcccatgaattttggagtacagactgggtccaggtatgcagggcatagattagagccctgagaaataggattaggctggaattgctgggttggagatcagtagcttccaggaacactttttgggcctggctgtcttcattatccccttttgttttctcctggggtctgcaggtattgccctgttttgttcctctaatatcactttttttttttttctgcttttgaccagggtttttgcctctggtctacaactgaatatcctatcagactctcctgattttgaaataaatatatagtttttttgaggtgttctagcgaatttctaaatctaaatgttgtggcagagttattacatactaattttgctatgagaggttgtagaatcccagatgactaatcttgtaaaccatacacgcatttccatctaattctccattgtatatcatgttgcagaaaataacagcctctagagtttacattgcctcctttgactatatttcttatttaagattagttttcagataagaccttttcatggcagtacataactgtacagagggcttccaacttgtcttgggagctctcatctctgggagacatcacattacccactgccccctgccccccgcccccagcctggatgcactcagcctgtaccccatttctgtcctcagccaaacactgctgaaatgcaagagctttcaattgctagccagtgaagatgcagactaagggatttccatgtagaagcccgctcttttcagctggctcgtcgagagctggaggccccttgcttgttcacatgaggctttttgtccctgacttggtggctgctgtttcacttctcagcagaaagggacacccttgcccccccccagaaaggaagatttgatgtaccacttccgaaaggttcagtcgggcatcactgtaaccaagaagataggtcaggtgaggctggaggtggaacagggctgctcgctagaactccagattgttccacaagtgccttctggcagagaatgatggaagcttccgtgatttttttttctccttaatagttatgagcacagaagaggagcagattgtctggctatagaagctgtcttattttttatttttgtttttgagatggagtctttctctcttgcccaggctaaagtgcaatggcgcgatctcggctcactgcaacctccgcctcccgagttcaagcgattctcctgcctcagcctcctgagtagctgggaattacaggcatgcgccaccatgccagactgatttttgtattagagacagggtttcaccatgttggtcagtctggtttcgaactcctgacctcaagatctgcccacctcagcctcccaaagtgttgggattacaggtgttagccactgcacccggccgaagctgtcatattaaatagcactttctgcttttagcaaatttaatccaaatgagactttagattttcttgctctgacttaccagcagttccttgaaacacatttaattatttttgccagaaaatcactcaagcacttacgccatttttttaccgtgaaaatatgctgcattattttaaaatatattagaagtcagtaaccataagattttatatgttttctaatgtattctgtaagctttctgctgcttttgtttggaaggtgtattttgtaacgtagaggactgctttatctgcttgtaagcttgatttttgtttttactgtaatttttttttcttttgctgtattgagaaatacattgagtaattataaagtcagtggcatgtttataagttaatatttgtatctattccttagttactctaactcaaaacctaaagtaatcttcaactctaatttactctgacatccagttgactgccaagtcctccaacttaatccttatccttttttttttaaagagatgcagtcttgctttgtcacccaggctggagtgcagtggtgcaatcatagcttactgtaacctcaaattcctgggctcaaatgatcctcccacgtcagcctctggagtagctggggctacaggctcttgctaccatgcccagctaactttttatttttattttttatagagacagagtctcactgttgctcaggctggccttgaactcctgccttcaggcggaactcctgccttcaggcggtcctcctgcattggcctcccaaagtgctggaattacaggcccaattttattcttgggatgtatgtctgaaactctttccttcacttccttcccaagccttagttcaggcccttctcatctgtggtcttcaaagtcgccttcagctggttcaggtccttcctttctgctgtatctttcatgggaggacatgttatgtatcactgtcctacttgaaaacttccattccccattgatgagggtgttacctccagattcctaacacaggtgctgaaggcatgcctggataaaggcactcccttgatctcctggccaggtccccgtacacctgcagcgcatgctccacattctgtctttactgatgctgtgtcttctgcctgcggagccacccaccattctattcacagcccctgcctcagcggagcacgtgcctccctcttcctacactgagctgtcctttctattgaatcccctcttttttgtagtatgggaaatattttattatgaatactcttttctctgttgcctccgtgaccacgttaactttgccctaattcgccttaggactccatctgcttaggggaaagttaggatttggttacagaaagcaagctgctagaaagaacagtgtttagcttctgacaggcaaaataggattttgcaacatgcttttcctttttaatgcttagacattttatatgaattaatatttttatttggttgcttatacattactttctttttagctagaatgtgaaccctataggaacatggggattgcctttcacatctttgtatcctcagtacctaatgttcagtcaccctgtggtcttgtgtcgtatatacatttagccttccttaattaaaccatatgtactggtccccgtcccccacccccaaatagagagaaagaaattccttgaatactacattgccagtatcaaaccacaccttgatatcctctggggaaagggaggtatcagttgaaaagagaaaagaggttaaaatctaggcattaaaatgtgtaaggcttagatgctggcaatttaaggtatgttttcctgaggttaattttgattgtgtgcaaattttacctcatatctaactgtaggatttagtcaccacataagatgggatacctccataaatccttcagaaatgtttgtgaaattaaataaagccttattgaagactcagctcttgagagtcatctacctacctaacagttattcttgaacagaagagtcttacttttccctataaggcagtgtgatagccatctgtatattcatataatttatgttggcgcttacttcatttaaaaatgtattccgtgaatgcagttgccaggcggtgtgctgatcagaaacgtgtaccaatggcctcttttataattataagaggaagaccaacctgaaacagtcacacaaatgattaattttaattgtggaggagtgctgggaaagaaaaataaaagatgcaatgcaagtgtttacaaaggagctttgagcttgtttgaagtggtccttgggcacttaagcaaggcttaaagaatgatgtgattagaagtggcttagcaattctaaagaacacagggaaggcgtgtggccagaacattggtccctagagcacatcgcctcctgacataccatttccttaagttaatgttttaccactatacataggccctcccctttgtttacccagatttttttaattttaaggatgtttttaataacttagaatcctgtaatttgttgaacagtcctgtattccctttacttatattccttgagattttataaaatattttttacatgtcccaagtcttgattatatctttttacctcttgttaagaaatacttacttttctatttttatgctatatttcatgtttactgtagaaaacaaaaaaagtaaaatttttctttattcctatcactgcagcttataagcactctaaacattttgatctatattttgccaatcatatattttagttaaaattgttgttgacataattgtagattcctgtgcagttgaaagaaataatacagagctgagcgcggtggctcacgcctgtaatcccagcactttgggaggccgaggcaggcagatcatgaggtcaggagtttgagaccagactggccaacatggcgaaaccctgtctctactaaaaatacaaaaattagctgggtgtggtggcgggcacctgtaatcccagctagttgggaggctgaggcaggagaatcgtttgaactccggaggcagaggttgcagtgagccgagatggtaccattccactccagcctgggcaacaagagcaagactgcatctcaaaaataataataataataataaataaactttaaaaataaaacagagagatcccatgtgcgctttgcctagttcccccatccactgcccataacattttgcagaactgcagtacagtatcacaaccacaatactgacattgatacagtctgctcatcttattcatatttccccagtgttactcgtatccacgtgtgtatgcattgtgttttcaatactcttttattataaagctgtttttaatgtgattcaattctaggttgttttgttctgccctcaaaaagcattccctctcctaatcatatctccgtcatacccttgtatgttttctttaaacctgttttaagaaagcagctacctgtaagagaaatgagattgaaaacagaattgccaatctgcttgtactttataagcctgttgattgtttagatacggtttagccagtttatagttaccctgggtgctgaaaggtatgctggatgatacctaaccaacagagaaccattgaatgccgttcaaaatggactgaagcatcagcaatgtctgaaaaaggcctgacagtaatgtacatgtcaaatggcccgtaatttaagcagagtagagtaagtagaagaataaacatggggaaagttccagcaacagaggaggctttgagcttttgctcttcatcttgagtggatgttgttctcaggtggtaataggccatcgagctttctccactggctgcctctctggggaacaaataaccgaaaagatactcagcaccctggttggtacataggtggtcagttgatttatacttcctggttttcagtgttgcttgaattttctaaatggaaacacagtacctttataatcagaaaacaatcccgagttttgatttgagggtgttgtaaaaagttaaaaaaaaaaaaacagaaatgtgaaaaggaagttgtgttagagtatttggagttgagaaagcatgaaaaggacagaagagaagctggttgtcaggttgcatggggtagctacaagcacactgaccagaaagtcagctggaaaaaaaatgtagaaacaggagataaaacggccaaggggctatacaagcaaacagcaaggacctgagaagaaaaactagttaggtgtgactgtcagagtgatgtgtacagtgtgatcctttctgtgtaaaaacaagcagtaagaattcgctgtttacgtttgcgtgtgtttggagaagagtggggaagagtaggcactgccagactgtgaacactggttaggttattgttatatctttgtattatatacactggacatgttatttgtataatatgagaagaaattttataaatcattaaatcttttggcatttaggaacatttgtgttttctaatagttgcttctatactattatctttattatatgcccttcatcttctcagtgtttggctgttgttgtgattcccttttgtgagcagtgttgaagttagctaatattcatttcttctcccttctttcaccctcctccagagtctgatttgaagtattcctagctgctacctataaaagcaataagcaagattgttttacttttcacaaactcgtcctgttctgtgcctctgcctcggacatagctgtagtatagagtgttgtctcccttacatccttctatcttagacctactagtaaatattaatgctcactctaagttcttctcaattcttttttttttttttttttttttttttgagaaagagtttcgctcttgttgcccaggctggagtgcaacggcacgatttcggctcaccgcaacctccaccttctgggtttaagcgactctcctgcctcagcctcctgagtagctgggattacagtcacgtgccaccacccctggcaaattttgtatttttagtagagacaaggtttcttccatgttggccaggctggtctcaaactcccgacctcaggtgatccacctgcctcagccttccaaagtgctgggattccaggcgtgagccaccgcgcccagcctcttctctcaattcttcctgaagctctttctgcactagattcctcaggaagggcttgtgggaacaatcttctgtgaatcaacagtacatattcataatagtttgtcagcagcctattattttaaggccatttggtctgtatataaaaatgtttggatcacattttctttctttaaggtaaatatgttattctgttgtcttctggtataaagcattgctgtaaatgtttgacagtctaattatcttttgcttataagtgacttagggttttttgtctatgtgcccaaaggattttttccctctttctctctttttttttttttttttttttttttaaacagacaggatctcaccctgttgcccaggctttagtgcagtgaggcagtcagagcttactgaagttttgaactcctgggcttgaggaacaaaggatttttttaaccttttaattcaaagtctcatcatttatgcaaccatgtcttggtgttggctgttttgggttgttctccctcaaaaatccatgtgctctttcaatatgtagttttaaatcttttttttttaatttcaggaaaatcttgaattagagttttccgtttttcgtctggtacattgcttgggtttccttcttcaggaactcagcctgttatgtgtatgtttgatcttctttgcctgtcgtctgtttctttcacttcctctcacttttttaaacttcatttattaaaaaaaaatttttttttcgagacagagtttcgctcttgttgcccaggctggagtgcaatggcgtgatctcggctcactgcaacctccgcctcccaggttcaagtgattctcctgcctcagtctcccaagtagctgggattacaggcatgcgccaccacgcccagctaattttttgtatttttagtagagacagggtttctccatgttggtcaggctggtcttgaactcctgacctcgtgatctgcccgcctcagcctcccaaagtgctgggattacaggcgtgagccactgtgcccagccttattaaaaattttaaaaacatacatttaaacttaacagaaaaattatgagagagaagggggtggtgccaggcttttttaaacaaccagctcttacatgaactcatagagtgataactcattaccatgaggacggcatcaagccgttcatgaaggatctggccccgtgacccagacacctcctactaggtccatttttaacattggggatcacatttcaacgtgagatttggagggggcaaaactacaaaccatgtcactcagggattggaggagcaagtaccacctatactttggactcaggtagaaaggcaaaatatccaggaaataagctgctaccgtccagggttcagcagaggtgcccatcagcctgccaagtactcaagagtccagcctctagggagctaatcatcatggtgagctcttcgaggcacagggagctgggaagacagtgcttgccacccctgcctgaatagtgtttgcacagagagttctgttgtgtcttgattgggtcctcctgccactgggaatgctgtggattatactaggtctctatctggcttgtttcagggctccatgtgaaaaccttcttgatatcctagccatccacctgctcagtccctagtttgcaaggaggctgtggggagcctagattctgtgtcagatagaatgtactacattccgtctcaggaatgtaccacatcagaaaacagtgcgacctgcaggagaagtagaggtgaagaggcacattcttccgagaaatgtttctctcaacacccagcattccctggatatcagcaggaaattactcactgctagaaaatgccccatgagccttctgttaaggaggtcaagggagagaacagagaaagttctcaaagttgacttggtcactggtactttcttatgcggttcttattttgtttgccatcgtcatcatcatgctatgtctattttctcaatccaaatccactgctttcaccttggttctttctgaccggtttggcacactcattcagtaaatccttatggagagcccaatgtctgcataattgtgctgtgctgatgaccaagctagacctacgagtgtcggctcctttgagatgtacgggacagctcttctgtcatctcttctgggaagcctctccaggcttggtgaacagtggcaagatgtttaacagttgtacatgtgtcccatgttcctttctaagagcctgggcaaaccagacccggtcgcaggtcatcgtagtatggcgtgagcttcctctctcctttctgaccttttgtgtgatggcaagaacctgcagagtgacacaagcagcaggcttctgaggttgctctagcctcagaatggccgtcccttctccaccctggccctcattgctgaggtttcctttgaagcaacagtgccggaacagactaggggaagcagcttggacatagctgtatgatttattaccacccattgaggccaaccaaagtcggcaaggagaggtagcaggtcagtggtgcctggaagcttcctctttcctttgcaccagatgtgactgctctgcaattactcctaaatttgctactctcgtttttactagccaaccttgatgtttttcccttcttcctgtagaatagacttcccctctgatcagtactttctactcaacactatttgtggccacagtgggaactcattgaggacagggaccatgacattactacctgacccatcaacacttggcataacttgaaatgcaaggacaaaaattggctgcaagtacaatgtggtcttcactctgaaggtgatccttaaaacttggctttggcatcatattgccttaatatacctaggggattgggtaaaaccagttactttaaaagagttttacaattctggccttctagctatcttgtcttcttaaacaagagcacaagatgaatgtatcttagtgaaattttatatggtttgctttgagtaatcttgcgaagattgatttttagcacagtaggaaagacacattctaatagtgatttttttccccgagtttatgtactgctgttgcatgaaaatctgactaga

SEQ ID NO: 643 - protein, 597 aa, Homo sapiens
MLSRGWFHRDLSGLDAETLLKGRGVHGSFLARPSRKNQGDFSLSVRVGDQVTHIRIQNSGDFYDLYGGEKFATLTELVEYYTQQQGVLQDRDGTIIHLKYPLNCSDPTSERWYHGHMSGGQAETLLQAKGEPWTFLVRESLSQPGDFVLSVLSDQPKAGPGSPLRVTHIKVMCEGGRYTVGGLETFDSLTDLVEHFKKTGIEEASGAFVYLRQPYYATRVNAADIENRVLELNKKQESEDTAKAGFWEEFESLQKQEVKNLHQRLEGQRPENKGKNRYKNILPFDHSRVILQGRDSNIPGSDYINANYIKNQLLGPDENAKTYIASQGCLEATVNDFWQMAWQENSRVIVMTTREVEKGRNKCVPYWPEVGMQRAYGPYSVTNCGEHDTTEYKLRTLQVSPLDNGDLIREIWHYQYLSWPDHGVPSEPGGVLSFLDQINQRQESLPHAGPIIVHCSAGIGRTGTIIVIDMLMENISTKGLDCDIDIQKTIQMVRAQRSGMVQTEAQYKFIYVAIAQFIETTKKKLEVLQSQKGQESEYGNITYPPAMKNAHAKASRTSSKHKEDVYENLHTKNKREEKVKKQRSADKEKSKGSLKRK

SEQ ID NO: 644 - DNA, 1794 bp, Homo sapiens
  source 1..1794: mol_type = genomic DNA
atgctgtcccgtgggtggtttcaccgagacctcagtgggctggatgcagagaccctgctcaagggccgaggtgtccacggtagcttcctggctcggcccagtcgcaagaaccagggtgacttctcgctctccgtcagggtgggggatcaggtgacccatattcggatccagaactcaggggatttctatgacctgtatggaggggagaagtttgcgactctgacagagctggtggagtactacactcagcagcagggtgtcctgcaggaccgcgacggcaccatcatccacctcaagtacccgctgaactgctccgatcccactagtgagaggtggtaccatggccacatgtctggcgggcaggcagagacgctgctgcaggccaagggcgagccctggacgtttcttgtgcgtgagagcctcagccagcctggagacttcgtgctttctgtgctcagtgaccagcccaaggctggcccaggctccccgctcagggtcacccacatcaaggtcatgtgcgagggtggacgctacacagtgggtggtttggagaccttcgacagcctcacggacctggtggagcatttcaagaagacggggattgaggaggcctcaggcgcctttgtctacctgcggcagccgtactatgccacgagggtgaatgcggctgacattgagaaccgagtgttggaactgaacaagaagcaggagtccgaggatacagccaaggctggcttctgggaggagtttgagagtttgcagaagcaggaggtgaagaacttgcaccagcgtctggaagggcagcggccagagaacaagggcaagaaccgctacaagaacattctcccctttgaccacagccgagtgatcctgcagggacgggacagtaacatccccgggtccgactacatcaatgccaactacatcaagaaccagctgctaggccctgatgagaacgctaagacctacatcgccagccagggctgtctggaggccacggtcaatgacttctggcagatggcgtggcaggagaacagccgtgtcatcgtcatgaccacccgagaggtggagaaaggccggaacaaatgcgtcccatactggcccgaggtgggcatgcagcgtgcttatgggccctactctgtgaccaactgcggggagcatgacacaaccgaatacaaactccgtaccttacaggtctccccgctggacaatggagacctgattcgggagatctggcattaccagtacctgagctggcccgaccatggggtccccagtgagcctgggggtgtcctcagcttcctggaccagatcaaccagcggcaggaaagtctgcctcacgcagggcccatcatcgtgcactgcagcgccggcatcggccgcacaggcaccatcattgtcatcgacatgctcatggagaacatctccaccaagggcctggactgtgacattgacatccagaagaccatccagatggtgcgggcgcagcgctcgggcatggtgcagacggaggcgcagtacaagttcatctacgtggccatcgcccagttcattgaaaccactaagaagaagctggaggtcctgcagtcgcagaagggccaggagtcggagtacgggaacatcacctatcccccagccatgaagaatgcccatgccaaggcctcccgcacctcgtccaaacacaaggaggatgtgtatgagaacctgcacactaagaacaagagggaggagaaagtgaagaagcagcggtcagcagacaaggagaagagcaagggttccctcaagaggaagtga

SEQ ID NO: 645 - DNA, 16049 bp, Homo sapiens
  source 1..16049: mol_type = genomic DNA
catgaccctgccaccccatgggcctgctgctggtggcagcgtggccgcctcctgagagttggccctcccttgtgccactgccaggggaggaaaggccttgatgttccagacaataataaatgcgcctgtgacttagccttggtgtcagtctcttgcggacctgacaacccccatctctccttccctgattccctctgcctttccaggccccatccccctgaacagctcctccctatggtcctggctgggcctaaccctgccccagggcctaaccctacctgaggctcctccccttcccccggggcaggttgagaggctggagtgggtccctcagcgccctgggtgggtgggcctgcacagggggtacctccttctctgaggaactgggctgttagggattttccttaggccctttggtttccgcctacggagaggtttcccccattggttgctcttcctcagccagggttacttcctggtctgttcccctacccaataccccgccgctctgtcagcttgagctccaggtggagctccaggtggctcctcctctcccgggggaaggcggccctggaccagcaggcgggcctgctgtactcccgctttggggctgcagggaagctggccgctgtgggcggtctcgggccagccccgccccacctgtccttttcctggagactattagtccagggtttgtccctgcagtgccattggcctggcaggcaggatcgaggaggaagtggctgattactgagcggttcttcctcacctggcttgggccactgtgcacagctgtgccgctggctcagccccgccccctgcggccctctgccgtggcttccccctccctacagagagatgctgtcccgtgggtaagtcccgggcaccatcggggtcccagtctcctgttagttttggagggagggagggctttgttgatgctcactccgacgtgtgtgaacgtgagtgcgatctgccgctgccctgcgcctgtttccggtccctatgaacttccccttcccgcaaggtgtgaggacccccggctcactcatgctcctctgccccctctttaacattttcccctggacaagtgtgtatctgttctctccattgcatttctacttccagcctctgggctcctgcttctgcctcctgcttaggacctgtccccctgggtagctcacaacacctcaaacatagcagtcagaggccacccgcgaaggccctcccacgtccagccaacttctccgcacttcccaacatcagactttggtcccatcttctttgtttcctttcacttccctttcccctgcatcattcattcaacaggtacgtgttgagcatctattatgcaccaggtgctgtttaagatgctggtaatactggagtgaacaagacagacatggtctctgctctcacggagcttacattccagtgggaggttacagaccgaacaaataacccaataaattggatcattgcagattctcagaagtattacgcagaaaatagacagccttggccgggtgtagtggttcacacctgtgatcccagcactgtgggaggctgaggcgagaggattgcttgagcccaggagtttgagaccagcctggccaatatagtgagaccctgtctctacaaaaaataagaaattagctgggtgtggtggcacacgtcctgtggttccagctatggagaggctaaggtgagaggcttgcttgagcctgggaggtcaaggctgcagtcagcgatgattgcaccactgcacaccagcctgggcgacagagtgagaccttgtctcaaaaaaaaaaaaaaaaaaagaaaatgaaccagcttcatatgctagcaagtgactgggtgtgcaggtgacattactagctggagggatcagggaggccttcccgaggaggtgacatttgagctgagacccggatgaggaggaagaggagctggccatgtgacgtagtgatcaagagtcaagcatctctgggcagaggagatggtgagcacaaagccctaatgtgggaacaaacaaaaaaaggacagtgtgcccgtggcagaggaccctagtggagcggaggcagggccacagcaggttagaccatgttggagctaggatgttgaaagtgaaaacctgacgagatgaggtggcgcacgtctgtgatcccagcactttgggaggccgaagggggaagattgcttgagctcaggagtttaaaaccagcctgggcaacatagagagaccccatctctattaaaaaaaaatactgggtatgatggcccaagcatgtggtagtcctagcagtttgggaggctgaggtgggaggatcacttgagcccaagagttcaagaccaccctgggcaacatagggagagacctcatctctactacgactacgactactactactactaataaatagctggatgtagtggcatgcacctgtggtctcagttacttggaaggctgaggcaggaggatcacctgagccaaggaggtcgacgctgcagtgagttggattgtgacactgcacttcagcctgggtgataaagcaagattctgtgtcaaaaaaaaaaaaaaaagagagggaaggaaagaaggaagggaaggaagaaagaaaaagagaaagaaggaaaaaaaggaaagagcgagaaagaagaaagaaaaggaaggaaggaaagaaagaaaagaaaggaaagaaaaagaaaaagtgacacccagtcgaaagaagaaaggaaagaaaaagaaaaagtgacaaccggtcgaaagaaaaaagaaaaagtgacaaccggctgggcatggtggctcaagcctgtaatcccagcactttgggaggccgaggcaggtggatcacgaggtcaggagttcaagaccagcctggccaacatggtgaaaccctgtctcaactaaagatacaaaaaaaaaattaggctggcacagtggtgcgcacctgtgagtcccagctactagggaggctgaggcaggagaattgcttgaacccaggaggcggaggttgcagtgagccgagattgcgtcactgcactccagcctgagtgcagcgggagagactccatctcaaaaaaaaaaaaaaaagaaaagaaaaagtgacaacctgcttacagagtactggcgagtttgtgggtgggtggctccctagccctgctgattcttgcttctcacactcatgtctgcccctgccccagtgcacatcttgtcactgtcggccccaccgatggggttcctactgagtcttctggtccctgatcccgtctgtggtcattttcctgccaggtagcttggccaggcctcccctggtgcagatttcatccttggtttctcagcctggccttgaatgaccctctacagcagggtccccacctctcagaacaactttgctccagccacatggcttgctcacggccaggcactgcccatgtggactctgtgcgtgccacctctttgccctgacccatgttgcctctgggggagcacttcttcctccaccttccatcatgggctgtggcagtgcccatcccatctgcccccgacgctgtctgctgcagtatggttgttgggggaaagggcaccaggctccggcgtctgacagccgtgttttacccaccttcctactcactagcttgtgaccttgggcaattacttaacatctctgagtcttagtttctgtttctaaaattgggtgaataacacctactaagtagggttggcctgaggattaatagtataatgtaaaagctggcagcactgaaaccctgccacttaccagcttttcacatcagtatttgggaaatattgttaagctcatttgtcaggcggggattctgaggctcagagcagttccagaactttctacagattattttgccttgtttgcgcttccagactgcctatcttcttgtatcaccattgatcttgatctgtatggtttttaatttttttttttttgagacggagtttcactctgttgcccaggctggagtgcggtggcatgatctcggctcactgcaacctccacctcctgagaagctgggattacaggcatgtgccaccacacccggctaatctttgtatttttagtagagttggggtttcactatgttggccaggctggtctcgatctcctgacctcgtgatccgccagccttggcctcccaaagtgctgggattacaggcgtgagccactgcgcccggccaacttcacgtttatacacacccatgcaaacagcatccagatagagacaaagagccttccctgtaccctaaaagtttcccagaaattgttcccagttagcatatttatttttataaaggtaatgcatgcccatcatataacattcaaaaaggtatgtagagaaccaagtgtctcccccagccctgtcctccagccacccagtttccctccctaggggaagccaccaatatgtgtttcttatgtatcccctgttgagctgcttttcctcgttttggtttggcggtgttgatgtttgtatttggaattacaggtaggcagcatcatataccttagtgtttagggcctctaagatcaaccagccctgagaaaatcagccatggtgaggaccttgtcccccagccccccaggagataggccccctggtgggagtgctggggcagggcagaggcctagggacaagaattagaaaggacccatgttgacagggctgctcagggtcatgttgtccatccctctgccacagtggcatggacaaactgcatatgttggttagaggagggcacccttctctcttgcaagcattggcaaggtcttaactattagtctcctgctcccatggcagcccctttggacaaggaggctcttaatctctgttctttgaagccctgagggctggtgtataggagttcaaagcactggctttggaaccggactgtctgggtttgaatcctggcactgcagctgactcactgatggactcaggcaatgccttaaactccctgagcctcaggttccttgtctgtaaaatgataaagatagcccctgtttcatagggctgtggtgagaaaccaatcagacaaggcatgtgaacgccattatagcacagcgcccggcatccagcaggactcactcgatgacagttgtcaccgccatcattgttattagcgtgggccagggagggctgcgtaaaagcagctggtggaggagggagagatgccgtgggaccgtctgggttcgcatgcgtgaagtattatctgggcctggagtgtgcaaggcacacatgtgtccttactgcatgtgttgtcacatatgtgcaatgccatgctcctgagcctttgattgcagacgtgtgggaagtgggccccgtccccacccccagtgccaccctgctctgcttctcttcccttgctgtgctctaaaacgagaagtacaagtgagttcccccaaggggtcggccgcgcctcttcctgtccccgccctgccggctgccccaggccagtggagtggcagccccagaactgggaccaccgggggtggtgaggcggcccggcactgggagctgcatctgaggcttagtccctgagctctctgcctgcccagactagctgcacctcctcattccctgcgcccccttcctctccggaagcccccaggatggtgaggtaagggcctgccacccacggtagacaggaggcaagggtgcctggtgcccacgggacccctcctcactgccctgcctgggccgcccaggtggtttcaccgagacctcagtgggctggatgcagagaccctgctcaagggccgaggtgtccacggtagcttcctggctcggcccagtcgcaagaaccagggtgacttctcgctctccgtcaggtaggtgggccccccgcaaccccgggcattttggccactctcttgtgccatccaggccctgaaccactcattcctggttccccgtggcagtgctgactccccgtctgttcccttgcccccaacccccacactccccatccctgtctgtgcccacccatgcccatgtgtgcccccacccaggacctcagccgatccctgccctcctgcctctactcctgcaccgactggcctcaccgcctggtgccctgcagggtgggggatcaggtgacccatattcggatccagaactcaggggatttctatgacctgtatggaggggagaagtttgcgactctgacagagctggtggagtactacactcagcagcagggtgtcctgcaggaccgcgacggcaccatcatccacctcaagtacccgctgaactgctccgatcccactagtgagaggtgagggctccgcacccccgccattcccaagcagggatgagccggctcccaccctgaacagccagggaggcagggagactggcagccggcgctgcctaccctccatcccctcccctccctgcaccagctggggctctcaatgtccctcctccctgctgtcctgggacctggtgtctcagagcctaacctaccaccctttccacctaaccccgaggaagccacagaaagctgcctcgccctactccgggagccctggccgctgcaacccaggtcccactggagacagggaggccactgctggtggccagcatgtcgtgcaggccagctctgttgttagaaagctcttcttcctctggaatcgagcctgccttcctccgtctgcccctcaccccagcacatgttaggacagtgaggagctgacactggggtgaagatggggatgaatgcttgccaagacacttgatgccttgtcccagccgccccgtggggatgggtctgtcctgtggggtcaaataggtctccggcccaaacagagatcattgagagcacgatgtgaagtgttcacctgtgtaaagtgtctcacgctgtcccgggcacagagtaatactccaggcatttccttcctgtggcctccccgactcctcctgtggtctcccaaaggcatgggctgggggctgggggctctgaatgctcctcatgacaccatggctcctttcagcagccgcatctcaatgccagatccccttagagtaaagggcagcggaataacgctagggggttttcacatgcacccctgggccaagccgacttgcccttgccgtggatccctgcattcatggatcggttattgaaatgatcgggaaccttgctcctgccagcttgcagcctctctgagattcgggcctccaaactgcatcaatatttttggtcaaggcactgattgaaacttagagctggattcggtcacggtgcagccctgtggcccacctgggaggcctcctttcctggatcggcctccttcaaggccttccctctctctgtgagcctcacatggctggctccgtgtctgccccctgcccttcctcttccccaccgcaacactcagggggcttttggcaccgagaccctctaaagctcatgtcctctctttctccttgcctccagccaggagaggaggacgggctgaccagtgcctggaggtggaagagaggagcagggccccaggaggcccctgcagaggaggctgaggcctgggttcaaggagaagagagaagagagagaaggaagggagggcagtgccggggcgggaggttaagaccagggaagccgcactggaggcccttttgggtgacccgtcccaggagccagtgtcacccctgagcctgggagtgtgtgagaggctctttctcccaggttctgctgtgtcctctgccttgtctgtgcgcctcctcctctgcgagaatttgcatctgtccctcggtggctctgcgcttcctgtggtcagcctgacatttgcatggagacttcctcatcctggggcctgagggaaggggctcagccccctccccgctacctggggtcctagcctgtccccaggcggtgggctgaagtagcccagtggggttaggaggctctgggggtctctcggctggagtcacctccgggcaggggtgagatgggttgggacagactggtcctcccctccttccccccatccctgcggttggaaaatttgcccgccctcccctcgtccctgggctgaggaaacctcacaacctcacttctcactctctccccagaaggagttttgtgttttttccatcacgtggtttcctgtggggctgggctttgtggggctacagtttcctcctgggaaaggggtgtgcttcggggaaagggcttagttctgctttctgccctgacagccccttcaaatccgtttgaaccctgggctccccttcagtgacatcatccagggcaccccagaaccccctacaccactctttccccagtggggttgtcttccccgcctccctggcggagcgcaccccatccgccttccttgtgacttgagtctgtgtgtccatctcccaccactccctgtggtgtggcctcggtctgcgtttctctttgcctctggtctctgctggggcacagtcccatccttcacggagattcatccttagcttctctcctccaaatattttgaatattgccagcctttctgcctttcagaggtgggctctgggttcgaagcccggttagaactctggaggctaggatggcttgaacctgggaggtcgaggctgcagagagctgtaaccgcgccactgcactccagcctgggcaacagagctctggaagcttgccctagagtcagtcaagggccctaggccagtgagtaacagctcagcgtcagtttcctcatctataaaatgggggtaatatcatacctagctctcagcatgtttgtgagagacctaaatgaggtggtggatttggaagcatgtagcgcagtgcctggcacacagtaggtgcttgatttccggcccctctctgtgaatgtctctgctcagcgccttcccctgtggcctgggtcttaccttccctgacgctgccttctctaggtggtaccatggccacatgtctggcgggcaggcagagacgctgctgcaggccaagggcgagccctggacgtttcttgtgcgtgagagcctcagccagcctggagacttcgtgctttctgtgctcagtgaccagcccaaggctggcccaggctccccgctcagggtcacccacatcaaggtcatgtgcgaggtaaggcagccaggcggcgggggagcctctgctgaggctcctgtctgtgaccacagtgtgggtggcagggagggtctgcctgggcttgaattcaaggctggggacccagggagggagactcaagtcctgtgaatggcctaatttggctccccccagggtggacgctacacagtgggtggtttggagaccttcgacagcctcacggacctggtggagcatttcaagaagacggggattgaggaggcctcaggcgcctttgtctacctgcggcaggtcaggggtgggcccagctgcctccccacttcccctgagctgtcccccagatgtgagcttctgggatctctgagttgctgacttctcgctcttccccaccccagccgtactatgccacgagggtgaatgcggctgacattgagaaccgagtgttggaactgaacaagaagcaggagtccgaggatacagccaaggctggcttctgggaggagtttgaggtgcatggtggggaccggcagggctggggcagctgaggtggtggcagcggcctggggccccaggcggacaccttcccctccttgcccacctctgctcctgacccaccccacgtgagctcccccgatggatgccctctttgggagctgatgctcatttccccacccacatctcagagtttgcagaagcaggaggtgaagaacttgcaccagcgtctggaagggcagcggccagagaacaagggcaagaaccgctacaagaacattctcccctgtgagcacccaggctgccccattcacccaggataccgcccctgccccagctgcctcccctcatctcacaggtctccaccctccacgccaggaggggccatctccccacaccccccacagagcctcccccttctccaaaaggcctctactcctcccagaagtgcctccccaccaccagcaggcaggttgccccctgctcccaacctccttgtgaactccctcactccctccatacagatgatcccccacccctgctgcccacagtcccccgcaagcctcatggcttctgagaccagaatggcctgttagctcaggagggtctgacccaggtgtggtgagtccctggctaacccagaccatctcgcctcctctccgcccactcccagttgaccacagccgagtgatcctgcagggacgggacagtaacatccccgggtccgactacatcaatgccaactacatcaaggtcagcagtgtgggccacgtgggaggagaggctgggccctgggaattccctgtctggtggggggaccctagatccagagacagctgggcaaagccgaagctggcttcttgcatgggtgagggtggcagtggttcagggcctgtgctgggccaaggggctcactgtcttggggtgcgtctctccacgcttgcgtccagaaccagctgctaggccctgatgagaacgctaagacctacatcgccagccagggttgtctggaggccacggtcaatgacttctggcagatggcgtggcaggagaacagccgtgtcatcgtcatgaccacccgagaggtggagaaaggccgggtagggcgcccccccttccccgcatccgcccccgtgcttgtggtcatgccattaagtcgaagagcagtcagatgccagggcagaaagggatctcaggggtgagggtccggcccttgttgggaaactgagggctagtgacaaagtctcgactacacaacgtgacccccagatccctgcatgcatccctgggctcttctgagctccagacccaggttccaggctgtcctccttcctcctacccctgccccacctgtctgcatccaggcccctcctgtcctccctgccccatagatctctctggagtctgccccttaccctgcaggctccccctacacagcaccctctgtgctgccattgaagtgatcccatccgtgacacaaactgggtcaagttccttcctttctgaaatctcttccatggctcctggtcacctttgggataaagtcgcactctaaggcctggcattcaaggtctggtggcttccctctgacccgcacgcttctcttgaaggctcaccgcccccagcagccccagctctttcaggttcccagcctttctttgcacaagctcattttctgctaggaaatgactctctccacactatctctgcctggcagatgcctcgtttttgaagacacagccggagcgctgcctcctctgtgaatccaggtcttgtttcctccaggacctagagggagaattacgtctttcccagccacgctcctcagcgcggtgtctcccccggtcacctgtctctgtgagctcctcgaggcacaggggcacagactgggtgttatttgtgtctgtgaagctgtgtggtttgcacagcttcggggacaatgcctgccctggcaacgtttgttgaatgacaaacggatgtaccggtgaagtggctggccaggcctcaccacctgttggtggttgatctgagacgagagcccaggtctcctgcctctctgccagcccatccgtccatccaacaaatgtttgggccggtgccaggcactcagaacatagagcaggacctgggatgggccacagtgccctgctctgtgcctcatccccacccgaccctccctttccagaacaaatgcgtcccatactggcccgaggtgggcatgcagcgtgcttatgggccctactctgtgaccaactgcggggagcatgacacaaccgaatacaaactccgtaccttacaggtctccccgctggacaatgtgagtggcccccacgccctgccccattccgggagtccctccctggacttgttctcctctctggtcgggtagggtgagatggatgaggtgttccgagagaggagggggcactgaccctatgtcctcggcttagggagacctgattcgggagatctggcattaccagtacctgagctggcccgaccatggggtccccagtgagcctgggggtgtcctcagcttcctggaccagatcaaccagcggcaggaaagtctgcctcacgcagggcccatcatcgtgcactgcaggtgaggatgataatcctgatggtagtagtgacagctgagaagtaaatactgctaagtgccatgagctgttataagcaatataaacgttagctcgcacattgagtgccctccgctcacccccggcttctcctgggtcccctcatggctccagaaccctgggtggatcgtggctggaaccagccccactttggccctctgcctgtgggtatcttcctcagagccctctccggatgtaccatctcgcccaaccctgccaaatacagaggaggagcccgggacccagttgctggccaggcccaagctagtcagggcaaggccgggcaggcacccacagtaggcctgtgtcccggctgctccgctttctctcgaggtcccattctgttggtttcttctcccaggaacatctatgaggcatgtgctccccattcctcctctttttccatcggtagccgcagggcttcggcttcttcctgactctgccctctctcccagcttccccaggcagtgccccatcctggcccccagggctgtgtggggatgggtgatgcttctttggggctgcacataactcctctgtctatctacccgcatgtttgtgatcaggagacctctggtaaggtgcagaggtgggggctgcaaggaggagcaggggttccacaggtgagcccactgagctggcctggcctgggtggatgagaggcagtgggtgcagggcccctccgcttaccagctgtgtggtcttggacaaattacttaacttttctaaccctcagcttcctcatctgtaaaatcaggatctcagggttgtcgtgagaactcaatgagaccctatcgttgtggctggaattccgtcagccctcaaaaactgggcgctgttactagtttagtaactcacatcaggcagagaataggggaatgggaacctgccttgccccggtcccttcccactccctccgtggaccccaggcctgcgacggcctctggcttcctcctcttcccccagcagctgtttgtcctgggacagggcaagtcggctgaatctagaggtgcccccgatgggctgtccggggacgcggctctgtcctgtgctctctcagggacaggcccatccccgagagctaccctcctgctcacccgccacacacacattcacacacttcttgaaagccccatggcctttatttagacgttacaggaaggaagtgggtgtggggggttatttttgacaatctgggtttgaaattagacagcgcgactcagggcatcagcttgctgggctcagctgagggtgggcctggggtctccctgaggtctgtttgcccagggctgggaaaggagagaaacttcctactgcactgctcccctgagtcccctgaccctgtgcccccgcaccctgctgtctcagggctatcctttccctgacgtcagggtttgaaggaaaagggaagtgaagccatgctgagagacgctccataactccttcagggagaggcggggagggctcagggtacctgggagccggcaggacagtggtgggatttgggggtcccaggtcttccggggtgggggcagccactcactaggagtgaggagtcggcgcgaggagtggaggagggaaggatggtggcagctggggagccagcgtcagcaccgcagagcccgaggtggagcgtgtccatgcagagctgggcaaacctccatcatcacttgcccggtgaccctgggcacattccctcccatcactggaggctcaggctgctcctgtggtgcctggggctggagctgagcgctgggtaccccccttcccggggagggcttgactggcctctgatggcacccccgtctttccccagcgccggcatcggccgcacaggcaccatcattgtcatcgacatgctcatggagaacatctccaccaagggtgaggggcacctgggggtttgggggtggggggtgagcagcccctcggtgtccgcctatgcctggacctgaggtttgactgccccccacccaggcctggactgtgacattgacatccagaagaccatccagatggtgcgggcgcagcgctcgggcatggtgcagacggaggcgcagtacaagttcatctacgtggccatcgcccagttcattgaaaccactaagaagaagctggaggtcctgcaggtgcgtgcagagcagggcctggggggggggggggctgcagtgcaggatgggtgccacctggccctgctgggaccaccaccttcccactgtccctctgcccacagtcgcagaagggccaggagtcggagtacgggaacatcacctatcccccagccatgaagaatgcccatgccaaggcctcccgcacctcgtccaagtgagtggccctgactgccactgcccggcatccacccctttgtcctgcccagcccgatcctcactttctggagaggacaagtgttgcagctggggggacctggcttcaagttcaggcttggttctcaccccttctgttcataagcatttcctgagtgcccacacgtgtgggcctctgctaggtaccagcagcgcactcgtgtatgagatgtagcctctgtcctctaggagcttggagtctagtgcagggaccgtggctgcgtcacctgtgagacggggtggccagaggggactgccagtgccgggtccccctgtgctgtctcctgacctgcaccaactgcctgtacttgcccccctgcacccggctgcagacacaaggaggatgtgtatgagaacctgcacactaagaacaagagggaggagaaagtgaagaagcagcggtcagcagacaaggagaagagcaagggttccctcaagaggaagtgagcggtgctgtcctcaggtggccatggtacagctcttctgcctgggtgtcctccctgccctgccctgtgtccttggctccactgccttccctgggtggatggggtggccgcagcctcattctgtgcttcccagctgccccagaccctcttgttccacctccaggttccagctaccctctcactccctcactcccttctcttggcagcctcagccctgaccctgtggaagcatttcgcgatggacagactcacaacctgaacctaggagtgccccattcttttgtaatttaaatggctgcatcccccccacctctccctgaccctgtatatagcccagccaggccccaggcagggccaacccttctcctcttgtaaataaagccctgggatcactgtgtgtcgcctctgagccctttgcttgcccagtgagtgggcggccagagggcagggcaggatgggtaactgtgtgtgcctccgtgcgtgcctcgcgtgaaagctccgccttccgtcagacggacgtgggtcgggactccgcctcgcacgtgggagggtgaccgtgggtgaagctccccagtctccttctttaaaatggagggcgatcataacagggtggttgtgaaaagcaccgagatgacggctgacgataagacgggcacagtgactcatcacacgcttgccatgtgcccaggcactaaaagactacacacgttagttcagtctaggcacttctgtcattctcattttaccgtggcggaaactgagggacagaaaaactaagtaacttggtcacttgcccaaggtcacagggctatggaacagtgaggctgggattcgaacccaggctgtctgaccccagagcccacactccttaccctggagttgcagctggggccaccctcaggggggccctgatcacactcccctgatgctgagttccagatctgaactaagaagagtagttaacagccggaagcgcagacctgaggccagcccggct

SEQ ID NO: 646 - protein, 849 aa, Homo sapiens
MAAAAPAAAAASSEAPAASATAEPEAGDQDSREVRVLQSLRGKICEAKNLLPYLGPHKMRDCFCTINLDQEEVYRTQVVEKSLSPFFSEEFYFEIPRTFQYLSFYVYDKNVLQRDLRIGKVAIKKEDLCNHSGKETWFSLQPVDSNSEVQGKVHLELKLNELITENGTVCQQLVVHIKACHGLPLINGQSCDPYATVSLVGPSRNDQKKTKVKKKTSNPQFNEIFYFEVTRSSSYTRKSQFQVEEEDIEKLEIRIDLWNNGNLVQDVFLGEIKVPVNVLRTDSSHQAWYLLQPRDNGNKSSKTDDLGSLRLNICYTEDYVLPSEYYGPLKTLLLKSPDVQPISASAAYILSEICRDKNDAVLPLVRLLLHHDKLVPFATAVAELDLKDTQDANTIFRGNSLATRCLDEMMKIVGGHYLKVTLKPILDEICDSSKSCEIDPIKLKEGDNVENNKENLRYYVDKLFNTIVKSSMSCPTVMCDIFYSLRQMATQRFPNDPHVQYSAVSSFVFLRFFAVAVVSPHTFHLRPHHPDAQTIRTLTLISKTIQTLGSWGSLSKSKSSFKETFMCEFFKMFQEEGYIIAVKKFLDEISSTETKESSGTSEPVHLKEGEMYKRAQGRTRIGKKNFKKRWFCLTSRELTYHKQPGKDAIYTIPVKNILAVEKLEESSFNKKNMFQVIHTEKPLYVQANNCVEANEWIDVLCRVSRCNQNRLSFYHPSVYLNGNWLCCQETGENTLGCKPCTAGVPADIQIDIDEDRETERIYSLFTLSLLKLQKMEEACGTIAVYQGPQKEPDDYSNFVIEDSVTTFKTIQQIKSIIEKLDEPHEKYRKKRSSSAKYGSKENPIVGKAS

SEQ ID NO: 647 - DNA, 2550 bp, Homo sapiens
  source 1..2550: mol_type = genomic DNA
atggcggcggcggcgcctgctgctgcggcggcttcttccgaggcgccagcggcgagtgcgactgcagagcccgaggccggggaccaggacagtcgcgaggttcgagtgttgcagagcctgcggggcaagatctgtgaagcaaaaaatttattgccatatcttggaccccacaaaatgagagattgtttctgtaccataaatttggaccaggaagaagtttatcgtacccaagttgtggaaaaatctttaagcccatttttcagtgaagaattttactttgagattccaagaactttccagtatttgtctttctatgtttatgataagaatgttttacaaagagatctccgtataggaaaagtagccatcaaaaaagaagacttgtgtaatcacagtggcaaagaaacttggttttcattacagcctgttgactccaattcagaggttcagggtaaagttcaccttgaattaaaactgaatgaactgataacggagaatggaactgtatgccagcagcttgttgtacacatcaaggcatgccatgggttgcctctcataaatggccaaagctgtgacccttatgcaacagtttctctagtgggcccttctaggaatgaccaaaagaagacaaaagtaaagaagaaaacaagcaatccgcagtttaatgaaatcttttattttgaggtaaccagatccagtagttacaccagaaagtcccagttccaggtagaagaggaggacattgaaaagctagaaatcaggatcgacttgtggaacaatggaaacctagtccaagatgttttcctaggtgagattaaggttcctgtgaacgtattaagaactgattcctctcatcaagcctggtacttgctacagccaagagacaatggaaacaagtcatccaaaactgatgacctggggtctcttcgattaaatatatgttatacagaagactacgtgcttccttcagagtactatggtcctttgaaaactttgctgctaaaatcaccagatgttcaaccaatatctgcctcagctgcttacattttgagtgaaatatgtcgagataaaaatgatgctgttttgccccttgtacgactgctgctgcaccatgataaacttgttccttttgccactgctgtggctgaattagacttgaaggatacacaagatgcaaacacaatttttagaggaaattccctggctacccgatgtctggatgagatgatgaaaatagtgggagggcactacctgaaagtaacattaaaacctattcttgatgagatatgtgactcctcaaaatcctgtgaaatcgatcctattaaattgaaagagggagataatgtagaaaataataaggagaatctgcgctactatgtagacaagttattcaatacaattgtaaaatcaagtatgagctgccccactgtaatgtgtgatatcttttattctctaaggcagatggctactcagagatttcctaatgaccctcatgttcagtattctgcagtgagcagctttgtatttcttcgtttctttgctgtagccgtagtatcacctcatacttttcatttgcgacctcatcatccagatgcacagacaattagaacattaactctcatctcaaaaactatacaaactttgggaagctgggggagtctgtccaaaagcaagtcaagtttcaaagagacattcatgtgtgaatttttcaaaatgtttcaagaagaaggatatattatagcagttaaaaagttcttggatgaaatttcatctactgaaactaaagagtccagtggtacgagtgagcctgtgcacctgaaagaaggtgagatgtataaaagagctcaaggaagaactcggattggaaaaaagaattttaagaaacgatggttctgcttaacaagcagagagctcacctaccacaaacagccaggcaaagatgcaatctacacaatcccagtaaaaaacattcttgctgtggaaaaactggaagagagctctttcaacaagaaaaatatgttccaagtaatacatacggagaaaccactctatgtccaggcaaataactgtgtagaagctaatgaatggatagacgtactctgcagggtgagccgatgcaatcaaaacaggctcagtttttatcatccctctgtgtatctaaacggaaattggctctgctgtcaggagactggtgaaaacactctcggctgcaagccatgtactgcaggtgtccctgcagacatccaaatagatattgatgaagacagagaaacagaaagaatttattccctttttaccctcagtttacttaagctgcagaagatggaagaggcttgtggaactattgcagtctatcaaggaccacagaaagagcctgatgattattctaactttgtaatcgaggattctgtaacaacctttaagacaattcagcaaataaaaagcataattgagaagctggatgaacctcatgaaaaatataggaagaaaagatccagtagtgcaaaatatgggagcaaggaaaatccaattgttgggaaagcatcttag

SEQ ID NO: 648 - DNA, 32707 bp, Homo sapiens
  source 1..32707: mol_type = genomic DNA
agggtctcaggcactgcactcacgctggagttgggggtggctggtccttttcttgaaccaggttttgcagagaattggtcctagtaaagagtatttgtgtgggaggagtttggcttgctggcggggagtatttggataatactggaagagcctcaaatgcatctcttgcctccttttgaataagatacttttgaggtccacccacctgccaaattccattctattttcttcccacagggagtttccctgattgggaagggcctgtatttcccgcgagcgttaggagatgtgcaggtctattcattgggggagcccaattcccgggaggatttagggatcacgggagggccggggcgttctcctggtggggattttaaggccgctcagagccacgactgggagctacccttagccagcgccccaagccgggagtacggttctctgcagggtagcccggctcgggggtggcgaaggcggtgaatggagacccggggggggcgggggcggggccgcggcgggcggggcggggcggggcgagtcgggccgaggcccgggggcggggccaggcgcgcggctggcctgggcctaggccgctgctgggctccgcctcgcccggctacgcaggcggcagggctgcggcacgggccgggcggcaccatggcggcggcggcgcctgctgctgcggcggcttcttccgaggcgccagcggcgagtgcgactgcagagcccgaggccggggaccaggacagtcgcgaggttcgagtgttgcagagcctgcggggcaagatctgtaagcgggggctgggctgaggggacgccctggcggcgctgggcgcgaggctgagggggcggcgggttcgcggcggtggcggcgccgagctgcgctgggatcgcgggcccgggagggggcctgggccgggcgcggttgaggctggaagggggtgtgttggggggcggcgtcgcctcgacggggcggcgtgggccggggctgctgctctccggagggagtgggagctggagatgggcctggggtgggagagcccgggctgcgccggcgtgaggggctcggtcgtggggagcggcctggacgcggggacgctggagtccggggcgcggccgggggcgcggtccgggggcgtgaggagcttccggccgccctcagactcaggccttcgcgcggctgcgggcgctggggagtggccccgcggtgggagccgagcagtaattatacggaggcgcggcccgaggaggtggcgggctgggaagtggggctggcccgaggggagggggctgttcgtttcctgggctcggcgagcctgggagaggttgaaaaaggcgccctgagctgcaggaaacgggccgccctggggcccgagtggctaccgcgcggtctgttcgcgggtgagcgccccgggaggagctcggcgggacacctgtacttgccccacctcgctgcggccgggacttgaatcgagggacggcgtgacaggcgggactaaaggcaggatgtagtggcttcctgtgagcaggtctcaaaacacaatcacccagcccgcactcagcccgcttaattcccttccttctcatgcgtgtaattgctactttagtgagcgagcctaccagttgactaaatacgaaattttgctcagagttgtccgagcattactgtggacagattatttgagttctgtcatttgaacattttagttttaaaaacgaccctttggtgtcaggttgccattttttttttcacagtggtttatttagatgaagtgctttttgttttctgtttgtaagagagatcaataacatttatttttgcatttgtcgaaaattagcattattttcttcatgcagtattctcagattggaaacatgcttcatgtttcttataaataaccctcaattatgagggcgtacttttcactttgaagaaaattgacttgcattaaagtggctaacaattctttcctgggcaggatgtaaaattttcctctcctctaataccagtactgttgagctcacattctcccacttttcctcttttcaggtggttcacgtatttgggattttatgaaacctcagaagcagacatgttaacttttcttatctttttattccctgaggtagtcctggggctcttaagagattacagttcttaaaacctggaaagtgacaccagagaggtagatcttagttcccaaaattaaagttactttctagggcataaaaccttttcagaattcagattaaattttatttattttttcttttttctgtaaccttatatttgaggggaaaattttgttttcaacttttgcatatatctaatttaacatttgggaaaactgtaaatgggccaaagtttctccctttatatgattttccagatttttaccactttcttagtgccacttgatgctaggcattgtctattggagactcactggtacgtaactgcaggttttaccatggaactacatatacacatgtcttggaattgagggttagggtttccagaaggacttagttgtcctgtgcttttgtctgccccatgccaaagaccactaagaacagttttgtaagtgaaacttgggtctacacgttaaaaaaaagaaaaacaaaaaaccactttgtttctatggtttaaagcaaccctggcttggaaattgatcatccagctgctgggaatgatattactgctttaaccacagttgaagtattctatctgttatcctagtcagtttcttgctttttaaattgcttatcttatagctcaggttatggagtgtctgctttctagaaaaaaaaaatgtatttgtatacttatatacagaagctctcttcccatttctttgtcctccttttaaatgatgtaatccacagttggttgacattcagaaccttgtgaagagatgctgttttctgtttccctgaaactaacatgtgggttttgtagggtggggactgaggggttggaagagtcattagcaggtgtcaaggtcacagaaatgagatggtggtggttctgacaagatattaagcagcttggggagggtgtaaccgtgtcagcttttctcttcaccacagtaggaaaccttggaagaaagcctgatagtgcccactaggagatgtgctggcagattttatactactgattgagagcctcttttctggagagttagagatctgtaggggctgaaaattagcctgaagaaattttcttatttctggacttgcataggacttttaaactgcacatcaccccagtgaaaagtgaggatggattggtttatgtatcttgaatgttcaagagataatagtccataaccttctttagggatttcattcctgtaattatttccccttatacttcacaaggtgaaatatctgtcagttggacagatatttgtctattggacaagaggaaacttaacaaaaagtggtaaccaaaaaggtggaggtcacaaaataacaacatgagacctcaatatatataaaggatgaagccccaataccccttttttgcttgagtgtacttttttttttttttttgccggggggctggggaggagggaagaagggacatgcaaatatgtttcaggtgttttatatgcgctcaaacgaacccagggaattcgagatccatctataagacaaaatattgtcagcaaccctggatttgctgcagtttgcgctaggaaaccatgacagttctgaattgtctgcttccttaaactttttcaagaggtgagtttggttgtttgatatcctaaggttgtcatatgaacccttgataaaggaaattaggggtgtactcgactccattcttcggtctgcactcctgtgtagcgagtagcaagtatgctagaacacctgaaacacatttgcatgctccctcctcccctcaaaaaaaaaaaaaaaaaaaaaaccgtattcaaacagaaaagagggattggggcttcctcctttatgtatcttcaggcttcatgctgttatttggtgacctcctttttgattagcacttgttaagtttcctcttatccaattacattagattgtaaaaatgttgcggagagcacccatgccaccatatgtgtgggcttatctactcaaggaataccagatcaataagagagccaaatgggaaaattttgtgtgaattttcagatgtgtggtacagtgcgagatctgtgggactatgtgttccaaaactcacttagtttctctggtgtcttcagaccaagaatagcctagggttatttgacagagtagggaagatctatagggtatggttaagtgcttgagcttagaggctgggtgaaaaagttagttacctgggtttgaatcttcacctaatttccaacttttgttaatgtctttgggccttcatattctcatatataaaatggggatagtaaaaatacctatctcacgggttgttatgaggtttaaataagcctccctccctactctgcccctcctcatctctgcctgctctttctcactccccaggatctgggtcatacaccgaccatctcttaggaaggagtaaagtaggagataaaaactaatcttcatctgatgttcttgtccaatgtatactggagtttccaggtgtacaaagctgattaaaatctgaagacctatattcttctttaaacgttgttaattaatcttcatatggcgttagccagctcacttatcttgaagcttaccttccgcatcttttaaatgggaatgatgcttttccactatccattgtatacaggttgttccctctgcttgggattgtctttcttctttactccaccccatctttatgtcaggaagctcctactcatccctcaaaagcctgctctatgtgatctccttcccaaaaccttctgagacacttccagtgccatctctggccagcatctctgctgctggggaacacaattccttgctcatttccttattatagcacatttcatagaaatcatttgttcacttctcctgttagattgtgagctctttcaagatagaattgattcttgttcatttttaaaaaatcatcccagtgtcagcacaatgcctagaacagaataggcctttagaatatgccctacctcacaatgttatcctgtggataattactagatatgaaagtattttataaattatatacctaaaaaaactagaaggtgttagtattaagagaaaactgtatgagtctgcatcaggaagttcatccctttcaaaatcacagtgcccactaagcttaggtttgaattgatgccaaagttgccttgttaggaaaaagattaaatttttcttaatgctctgattacttattattagggcatttgaatattgttactaattggtcctggagcttggaaaagaaaatctcatattcatactttacacattaagtgttttaatttgacatgacaggtttgaataaaaccgtctatttaattctgtgaagtataaatcaaaacattttattgactatccagtaaagttgagtggaagagattaaaaagggtgtattcatgctaagagttcatttttatcagatatttgaaatgagatgatgagttatttaggatggaggaagaatccatctttcagatggatagaaactggggagaaaagggttctttgtaaaagttcacagagcagtctgctaatcatttgctctgtggaagacgggaggtaaacctcagtgagttcatagagttgtttttttaaaacttagaactctttgaatagatccttaagtgactaatatagccagaataaaaccatcattttatcctttaatcatagctgctaatcctatttccttgttaatgtgctttatgaaattatttgacaataatatcagattacatgtttttgctactaataaagttctattctcttttgagaactgcaaacaaaatgttgtatagtcatatattcatgtaagttaagctttttatgtgtattaagacatttttatggcatctctttaggtttgtatgtaattttagttatcaaaaacccctatctaaagtgataaacattaaaagtttgtatcagtacacatacagagaaccataaatgacaaatttgttttcctgtcattaatgacaatgactttgggcaaattctttaaccttgctgagcccgtatttccttacttgtaaaattagaggtttggatatggtctttaacatcccttctaccattttgattattgctttttaacttgaaccatttgctttaaggcagtacatcagatgctttattttagtgtttaaatgtatttagtacacttgttttgcatgattcactgttttaaaaatatttaagatttattagataagagcgtttgaattctaaattttttttctgtgactgttaattaattcagcagcacgtaatacatatcgaagggtctgttaagagacgctaacccactggactgaaatgggcctaagctgtgaatcggatgaaagatcctattttatcctaaagtctatactaagcaatagctgtttttagacatctgtattcttagacaattatagaaatttaaagctggaaggtagagaacatgaaggtagagaaaataaaggttcttacccttcattttacaaatgaagaatctaacagagacagcaagtgtcacacagttgatggcctgttcggcactagtccactattatcaaagttctttctagaatgctatatgagattaacttattactatgaatgttgcaaatgtactacatttaatacacagagattatactacttatctgtttatatattgagaggtggtaagattttcactgtgccgtctacacactcttaactgttccttcttaagaactttgtgaagtggttaggattagtgatgaaactatggttatgacctaggtggagattgaacctggatgtttagttacttgtgccatggtctacctcagctattttcagttctgactgtctgtcaccatcacctgtgaactaaaaaaattatgatgcccagactgtaccccagacctactaagtcagaatttctggtttcaaaagttccatagggggtgatgttgggcagctaggatagtgaatttctgcttttgtcacaaatagattagccacataccctacctaaatgatggcaacctgctgtgctatcatttaaaaggtatcagtagaaaggttggtatagttacagtgagattttagtttgtttgcatatatatttgatatattaattctatttgattagataatatgaacacttggtacaaaattcaagaggtacaaaacagtatatacattgaaaagtattccttcctttcattatcttctagccattccctcccaagaagcaagcattaccaatttgttatatcctttttgttgtgtgttcttccagaaattaagcatttacaaacataaatttatgtgcactaatatattccttccaccaacatacaaattatagcaaaatatatacatttttctgtatcttgcttttttacacttaacaacatagcttgaagattttttcacattcacataaagagagatctgccttattttttaaacaactgcataatatttcatcatttggctgtaccacagtttatttagccagtcccctattagttgacacttaggttgtaaacagtcattgctattacagacattactacaatgaataaccttgtaagcatgtcatttttaatatgagtgtctttttgtaggatacatttctagatagatgttaaattgatgaattgaaggatatgtgcatttttattttggaaagacaatgctaaactatagcaatttaagctctcaccagcaatgtatgactgcctatttctttatacccacgtagggtgtattttaaaacttcttaatctttactggtctatgaaataaaaaggaacatttaatttgtagttttaatttgcacttttaaatgagagtgaggattgctctgtcaccagggcacgatcttggctcactgcaacctccgcctcccgggttcaagcgattctcctgcctcagcctcccgagtagctgggattacaggcatgtgccaccacgcccagctaatttttgtatttttggtagagacggggtttcaccatgttggccaggatggtctcgatctcctgatctcgtgatctgcctgcttcagcctcccaaagtgctgggattacagccgtgaaccactgcgcctggccctaatttttaaattttaaatttttctaaggcttgaaattaagttataggatctcttcatatttttaagagcctttttttttgatgtgctatgtgaactggtctatttcttttgtccttttttttctggtgagttacagtcttcttgatttgtgagaaaatgctttatgctgtaaggaagttagctattattttaaaacctgtgcaaagatttaaaaaatctgtatactttggctgatgcctgaatttattcttaagttgattgtgagatccagtgagggcagtcagttgtaagtttcatctacttatataacgtctgatggttgagaaattgagaaagaactgcttgaggaaaggtaagtgaagacttataaacaaaagttaaaagacaatagattgggagaaaatatttgcagtgtatccttcagacaaaggaaatgtgtataacactgaattctttgccaggcactgttttaaagcactttatgcgtattaactaatttaatccttacagtaactctaaaaataccattattatccccattttacacattatgaggaaacagatacacaatagctaagctaagtaaattgaccaaggttagatggctggtgaatggtggagctatcaatcagactgggcagattggctctagagtccatcctgttaactcttaacctactgtgctattatgcctctctatttattatgtccagattatataaataattcatacagacttaaaaacaagaggccattagaaaaataaaggatacgaataggcatctcacaggaaaggaaatacaaatgtccagtaaacatgaaaatattggtaaagtaaaaattaatcagggaaataaaattttaaaacatcaatttacaaaaaaaggaaagtttatctcagtctttggtgagggtttagggaaataagtattttcctcattgttgttgtgagtttaaattgataaagcaatgttggagagcattttggctatatctgttaagaatttaaatgtctatacaccatgcatttttacttctacctatttgccctgcatcaacagttgtacatttagagaagaggcatatacaaagatattcaatgttgccttgttggtaaaacagaataattggagacgacttaaatgtacatcggtaggaaaatggataatatgttcatacacgtattctatagcaactaaaaagaatgaggtatatctatgttatgaaaggaaagaactccaggatgtcttgttgggtaaaaacagcaagttgtagaataatatgtgtagtatcctgtgtattgttttaaatctcaaaacattttacttttctgcatgtagatggataaatacataaaaagaggtctgaacagttgtacagataacagtgattgcctcaatggtggataaagggagttagccggtgctgggaaaactggctaggcatgtgtagaaagctgaaactggaacccttccttacaccttgtacaaaaattaattcaagatggattaaagacttaaatgttagacctaaaaccgtaaaaaccctagaagaaaacctaggcaataccattcaggacataggcatgggcaaggacttcatgtccaaaacaccaaaagcaatggcaacaaaagccaaaattgacaaatgggatctcattaaactaaagagcttctgcacagcaaaaaaaactaccatcagagtgaacaggcaacctacagaatgggagaaaaattttgcaatctactcatctgacaaagggctaatatccagaatctacaaagaactcaaacaaatttacaagaaaaaaacaaccccatgaaaaagtgggtgaaggatatgaacagacacttctcaaaagaagacatttatgcagccaacagacatatgaaataatgcttatcatcactggccatcagagaaatgcaaatcaaaaccacaatgagatactatctcacaccagttagaatggcgatcattaaaaagtcaggaaacaacaggtgctggagaggatgtggagaaataggaacacttttacactgttggtgggactgtaaactagttcaactgttgtggaagtcagtgtggcgattcctcagggatctagaactagaaataccatttgacccagccatcccattactgggtgtatacccaaaggattataaatcatgctgctacaaagacacatgcacacgtatgtttattgcggcattattcacaatagcaaagacttggaaccaacccacatgtccatcagtgatagactgggttaacaaaatgtggcacatatacaccatggaatactatgcagccataaaaatggatgaattcatgtcctttgtagggacatggatgaagctggaaaccatcattctcagcaaactatcacaaggacgaaaaaccaaacaccacatgttctcactcataggtgggaattgaacaatgagaacacttggacacaggaaggggaacatcacacaccggggcctgtcgtggggtggggggagaggggaggggggagggataacattaggagatatacctaatgtaaatgacgaattaatgggtgcagcacaccaatatggcacatgtatacatatgtaacaaacctgcacattgtgcacatgtaccctaaaacgtaaagtataataaaaaaaaaaaaagagcgagttagccttatctgtaatggtttgatttcctatagggagtatatttatatattatattatcaaaagtaactatttatataaatgaacttgatacagtattaatcttaagctgtgccagtctctgttgctctactttggaagactatcctatctgcaaaacaagagtaatcaaatgttaggttttgtaacattttgagtgctatagaagaaataaagtcaacttttctgttaagtttttttggtaacttttgatataatttcaaacttacaaattgtaagaataggctgaggagggtggatggcttgagctcaggagtttgagaccagcctgggccacatggcaaaactccgtttctacaaacgaaaaaaaaaaaaaaatgccaggcatagtggtgtgtgtcttcagccctagctattaatacttggaatgctgaggccagagaatcacttgagcccaggaggttgaggctgcggtgagctgaggtcgcaccactgcactccagcctgggtgacaaagtgagaccctgtctcaaaaaaaaaaaaaaagtagaaataatacagcaaattcttatatactttgcctgtttgactaattgtttatgttagaaaaactttttaaaattttaatacattgtttcagagaaatgtggtaaaaagggtctgaaaattttggatcctttaaaatatgacatttgtgtgagtggtacagaattttagttttgaattttacagttttatataaaatattcttggtagatggggtgaactaatgtttattgagtatttcctggtttccagatgttgtgttaggatactttgcaaaatatttcatgtaatccaatttcatgaagaagattgttattcctattttagagaagaagcaacagacagaggttatttgctcaggattgtaagggagcagagccaagttttcagaaagtctttatgttaccaaagcccacatccctttctctacaaagctgcctgtgagatgatatattggaaggaattgatgaatacatttatgttgtcaagaagttgataattactcctaaattggctatggtctaatgtagtggatattcaataaaattatgatgtttgaatgccataagaatttatcttctggcctgttttgggggttcatgaatgtaattattttagctgcctaactgcttatgtgggtttgtatgtacttttgagtggttcttggatatgtgtacacacatacatacacacacacagatatacacatacacacctttatatgctcatgggtgtaacttctttatgtgtctaggtgtcttttttttgtggagggggggcgaagatcaatatgaatcctattttggccccctggatgctgtcaccagaaataacagccatatcccatatatagcctgtccatgtagccctgagttctgccagcacctggctttttgccttccttttgtttgtcataccaggctctcttggtcaccttggtagccttgctaagcttcttgtagctataggtaccattggcttagcccagaagagattcctgccatatgtacttcagagtttggtttgccacttgaggaaggggtctgtagggagcttgtagatcagcacacattcaaaactgaaaccggaagtgggcaaggcaaaccacaggaagatcctgcccgcaacttggtgacgtatctatataacccatagacacttcctggcaataccttgtgaaacttgccttttcgtgtatagtagtttcctaacttcttgttctagattaagcttcagtgaaaagtgattaatatgatagcagtgtagataactgtatgatagttattgtgcacatgacttccatgcagcaactagccccgattatgttctgtagactttatcactgaggagttgcagtggtatttatgcgtttactttgactttgtcttgtcactagccattgtcttacttatgtgtaattgtacttatatatagttcaggttttatacccacaaaaacccttgtgatataataccactatacaggattgccttatttatgtggaattgtacttatatatagttcaggttttatagccacacacacacacacgaaaaaacagttctttgcttcactgagtctcggctagccacccaaactgtgtcatattcctagagtcctgtgcccactcaagtgtttgctcactggtactacctcattttatcatagtgccttgttcttaggcagaaccagatttctggtaggagttatttaatgtgttgattttttttttgagacggagtctccctctgtcaccaggctggagtgcagtggtgcgatctcagctcactgcaacctccacctcccaggttcgacaattctcctgcctcagcctcccgattagctgggactgcaggtgcacgccaccacatccagctaatttttgtgtttttagtagaggcggcatttcgccatgttagccaggatggtctcgatctcctgacccgcccacctcggcctcccaaagtgctgggattacaggcatgagccaccgtgcctggccaatgtgttgtttttttaaagattaccaatcgagtgggattatagactcttggattattttacagatacaagtcatttgccaggagtgaggaaaattgcttgacaactgagttatctcaccatgttaatttatgcattggaaaactctgcttagtggtagatattccagcagtcaccatatgcctattggtactatttctcattctctgtctgattaatgtcacaaatgtgtaactttccagtggtgttttcaagatgacagttaaggagccactaaggaaggaaataacagctacataacttttttcttttcagtagttcttgacagtcccccctcctttttttgtttttgtttcttcataccctgcagcaatctgatgtactctgaagggggtaaatttgagactctttggaaggtcatgtgtgataaagacagttcttctcttcctttctccattcagaactgttaaagataaatcaatgggagtgtttttttcttgtgtaagatttattatatacaaaatattttttaagtgtgtgaaaactgattaaatgataaaggctaaggtagcatgtttaaagcatggttttctgctacttttctactaatcacttaacctctctgagcctcagcttccttgtctacaaattaggaatagtagttttactaatcatatagcatagttgtgaaaaggttaaatgactcggtatactgcctggcattttgtgctcagttaagtgttggttctaacatgagcagtagtgatactcataaagtatcttttcatagttttcttaatggataacttatttgatagaaatgtactggagtattcatacttacatgtatatccagttcttgtagtgttcatcaggttaaactggcaataagtgttaatatctgaaagcattagaaatcagtgttactctgtgctttttaaatttcaagtgttgtctctcagattttatttttttattttttattttttttgtctctcagattttagagctatagagaacctagaagattaactggctaaggagttgcaaactcaaatatacacagaccaggtataatgcagtaaagcccagcagagattattatgatttagtaagatacacctgtctgcagtttccactcaaaatcattttgccagattttgattattaaagagaaaccagaaatacaaatttatttattgttagctctcagtttctagatggtcacaaattattttttaaatttggtgcaggccaaacaaatctctggctagccaacctcagatttgtatcctcattttagagatgtggagcttgaggtataaaggttggacgtgtttccatgtatttcctataatagaaatccattgattctgtaacaaaggactcattttaaacaatgacctcctctgttatacccagttgttatattacaggttatttttggtcaggagctaatggcttggatgaagggaattgtatatagatgctaatttttaagaatgtctagccaagaaagggcactaatagttactatccattgaatatttactctgtcttaggcattgtgccaagcgctttaccttagttaatgctcacaacaatcttgaagcattatagttacctctttttacataagaggttgagagtaaggacatacagatagttaaatgcaaagttcatgttgaaacgcagatgtctgcctctgtaatgcattcatttaacttgctatactatactagtactgtatatgtttttataattatgcataccttttatcatattgcaaaaattgaaattaaactttagaagaaaatttcaaagaccttatgatatattaccattatatagggttgtcttatttatatggaattagattggcacaacagcattttaattttactctaaactagtcaataccagagactatatcatatttttaaatgtgcattagattcattctttctcactcttttttttttgttgttgttgtgaatgtaaatgacaaaatgtgcatattttatatcttttcatctcctgaagttctactgttctgtttaggttgatatttctattactggttgagcattccaaatttcaaagtccaaaattccaaatgctccaggatgcaaaactgagcaccaacatgattctcaaaggaaatactcattggagcatttcagattttcagatttgggatgcacaactggtaagtatatataatgcaacatttcaaaatgtaaaaacatttgaaatctgaaatacttctggtcctaagcatttcagataagggatattcgatctgtattagaacattatgtcctgagtcattcaagccagttaatgccaaattctgtggattctgtctccatagtagctcttctattttttctttcctcctatctccctttgttaccttaatgtaggctcttcagactatcagagtacttttcctgaagtatgaaccacacagaaacttttagcgacccttgttgcctactgaataaagttaaaccttagcttggcattttaggttctctgtttgatactagctgtcctttataatcttttccctctcattcccccttcatctctctttatgctttagtcagtttatactattcactgcctcctcgatggtgctcttcttgttgccaccctccagaacttgttcatgttatgccttcctcctggaacgttatcctccgatccccaatttctgtattttgaaaatatatatcattcagaagagttattgtgaagattaagtaaaataatatatatgaagtcaatgaaaaatctgtgtaatacatgtattaatttattcagtaagtggtagctattattatgatttggctttctgtcaccccaaataatccttaactttggatcatcttgtccaggaccctggctctttgcagtttttctaggggattaatcccactgggacccatgttggcgcctacccttgtacttcaggtaacctttgaagcagacctggacctactacatctctttcagatgggaatagtttctcagcacagctgtattcagaaagaccttaagagttgaatagaaagactctaggctttggagtttgatttatgccagataaccttaccagctatgtaactgaatttttttttcttaatttatgaaagggaatagtaatgcttatctcacagggttgtcgtaccgatcaaatgaaacatttgagaaaatatttaacactgtcttggagcatctaactacttaataaatctttatcttcttttctgtcttatccctgtagtgtcctcccctaggacatgaagaaacatacatgcaaaccttcaggtataaatgcatgcacataatcctcaaacatccacataggcacataggtacatactcacatatgtacatactcacatacatgaacagaagcatatacatcagaatctctacctttgatagtagcctgatattggaatttttgtcctagataaaatttatatggtaggatttgaatttactgtctgatgactgttacatggaatcattgatcttgtacatagagagttggctgtttttccatttctgttaatcttaacagttttgatttgatggtgtttatctttcgcgctttaaactatttactttttaacaatatctaaaagctgctgttttctatagttacatgtctctcctcttttttcaggtatttatgcagaagttactttctcaatgaagccttccttgagctacctcatttcttgtggtgcccatacttattagtattaggccatacatttttacttatttatcttatttgttgtcgatctctccatgtgtgttagcctaataaggacacagactttttgtctgttttgctcactgtcatatcctagcagcttagtaggtactcagtaaatatttgaatgtgtgaacttcagcactggtttattttcaaaacgtctctgtattaatacaataaagattctttaagtgcttttggtaactgtatacaggagactttttaaaaaatctttggagtagttgacataaatcaacttaaatgaaatggaaaaaagaagtttacatacaattttatggtttgtgatgtggtattggaacctcttttttgcccatgccaaagttatatacacacgcattgatacttattcagcagctgtttcattatatattttatgctaaggatggtgctaagaattggtccccttcctcaagaagtttatagttcagtgaagagacaaccaaactgcttttgcttggttgtgtctcatctttaccacctcaaaacattagagagccctgaggctcagtcttcaaatttcttttctatatttgctcccattgtgattttgtattgtctcttggttttgtaaattttatgtacttactgatgattctcaaattttttctctatctaggaccctttgtccttggacagattgtctgcacttggatgtataaggcatctcagatttaatattcaatacagtctcttgaatttggtccccaacaagaggctgtgtctctagaaatagcatctctattcatccagctgctcagactaagactcttagaagtcattcttgactactctatttctcacaccctgcagtaaatcctgttggctccatcttcaaaatacatgcccaaatgacccattctctccagacccgtgtctgctctgcccctcccctgacctgcaagttttcgctcattgagattactacagtagcctcctatctagtcacctgcttctacctttcccctctgcactgattttaaaacaaaaaatcttgccatttttatgctgaaaatccttcaaaaccttaccatctgacacacaaaaaaagcctaagactttcccgtgcctgtaagaccttatttaacctgtctcctcccatacccttactccatctcttactatctcctccctctccccactttgcttattgctttgtagccatactgccctccttgccactcctccagtgtgccaaactatcctgtctcagggcctttgcacattttattctttctgcctgtccgtctccttccccagatatctgtatggcttataccctcaatgacttccttcaggtatctgcttaaatattttaattgaaaggccttccctgcttccctatataaaataacattgacctcctccctgtctctaccctctgggcctgccattccctaactctcttaacctgctttgttttcttgaatagcaataaatatttatttcttccatgacaataaatactatatgcttatttaagagtttgtggtatttgtcgtccctgtatatattgtacaacagtttcgtatgggcagagacctgtttttattcactgttatatccccagcacttagaacagtgcctcgtgtgtttaggcacttagtaaatatttgttgagtgaaatgcaacaagtacaaaacaatatgatcactgtagtagagatgcaaggtacagtagaaacacatgggaaagagtgacatgactacataggaattgaggaagactttgcaaagatgcccttaagcagagctctttggagagaaaaacaggtagggcatttcatacaaagaaaatagcattgcagatacacagaggaatgagagaacagtgtgttcaaggaactaaaatatagtactgctacagcataatttgtgggggtaaagatgaactagatgaggttgaacatgtagtagatagcacctgatcatggagggatggagggtttttgtgccagactaaggaattttagattttgtcctgtcaagtgggcagtggtagatagtgtgagccattgaagacttctaagcaagggatgttttatttatatttatttatacgtgtctctgtgtttgtgtgtgtgtgtgtgtgtacgtattaaaaaggtaactagcaacattgtgaaggttgagtatcaaagctaaacacagcattttatttaagatatgtatgatttaggaagatatgatgtagaaaaacaattactatcacatgtgggcgagaggatatttcattttatatttggacaaaatcatggatgtatagtgggaagatgttcttggcatacttgcagtacatttgtgaaagagaagaaatgcacaatggaggattattctgtttgtctttgaaaatccaccctttaagaaagaagactttaaaaaattagttaacagttatgttgtaagtcgtaatgtacactagaaaagtgcttaaggagtaccagttatgaatcaacaagaaaagatgttacagaataaaataaattgtgcttgaatgtcaacctcctttcttcgtagaggaacagttggttgtcattgatatacctcctgatcttgatttattgttgaaggaaatagtgacagttgtacacacaatcaaatctatactgtttgctgtgggaacaatgtatctgcctttgtaggacaaatgtctgcttttgcatattgcaggactccgcatgcacagaatttttgaaatgagggatgaactataaaaacatttcttcctttcattcaaatgcaagtaaaaaccatttttattatttcagctggcttgcttgtgtcatatcttagcaatatattgaatttcttgaatactttattcttattaatttagggtcaaactatgatttgtgaatttaaggataaaatagaggcacccaaaatggtgcacacgatttgaatgttaagaatttggatttggcactcccagccaggcatggtagctcacgcctataatcccagcactttgggaggccaaggcaggcagatctcttgaacccaggagttcaagaccagcctgggcaacatggcaaaaccctgcctctccataaaatacaaagcaaattagtcaggcatggtggtatgtgtctgtagtcccagctactcgggaggctgaggtgacagaatcacgtgagtccaggaaggcgaggctgcagtgagccatgattgtgccactgcactccagcgtgggcgacagagcgagaccctgtctcaaaaaaaaaaaaaaaaagaaaaagaaaaaagaatttggcattccaaattcatgaaaatatgaatactgtattattgaatatatttttaaaattttatccaaatgctacagaagatgaagaaatattttgtgaaggtagatacaactatatatggagttaagatccatttcccaagttaaaggattccctttttaagtgtgctgctattcaactcactatctgatggaacaatgaaaataattttcagtgaaaaattgcttggtaatttctgtgtccatgtttgatccagatagccacgtgtagccggtggatttacccaaccatgatgaccagtaactcaaagtgggattttctaatttgttggaaacaaaggttagaaaagaattgagattaggtgacagcatcaactctagttagtttaagcagaaagagctttaataaaaaaattttaagtggcttacaaaattgttgacaaggctgaagaaacagactctagatctagaaaaagccatgttgcatctaggccaccaagagagttattgcctcttttaggatcagaaagacttttgcagaattgtgaaactgtaacttttagatgcctgtcttagaaccttaccacctctgccatgatcaggagtctactactgttaggaaatagccattagcaagcagccaccttcctcagtaagccgttgttgttgctggccctagagccaagccctgcctaccacaacctgtactgcagaatggatgccttgtgcctttcttaatattcatgaaatctgtgactgaatactaggacttcaacaaatactgctgtgaacatgaacatctccatgacaatgtttgctagtaaaacaacccaaactcaacctcccttctcttctgtccttgaaatttctagtgagtgcatctggttggtggaacttaaatcacatttacaactgtagccacaagagaggctgggaaatgtattttttaactttctcttctctgcagcacaggaagacatacactgaaggaggttgaaatggatgtgaacagtaatctaccatatttactgcaggtttagaacctggttctccttaaggctggctgtcattaaacgggctatagataagttgagaaagtttataaataataccgtcaaacaatgttgagaaactcatttgtttctttgtatatttttattgttttataatgactacattaaaaaaaaaactagaatttgtccttcacctctatgatgaattaagtggtctgtggataccgaaagtttcctcacgtttaagatgtggttagtggataaaaagaccaaaagagggagtataagaaaaaccctcatacaaggttacctgagctgaggaaaggttagtgttgtcaaataatgaagagtggtcaaataaggtgggactgaaaagcagtgttacgatttgggcacttaatattagtggttttttgggttttttttttctttctttactattgagacagggtcttgctcttttgtcccaggctggagtgcagtggcagctcactgcaactcccatcccctgggctcaagccatcctcacacctcagcctcccaagtagctgggaccacaggcatgcaccaccacgcctggctaattttttgtatttttagtagagatgagatctcaccatgttgccaaggctggtttcaaaatcctgttctcaagcagtttgcccaccttggcctcccaaagtgttgggattacaggcatgaccactgcgcccagcctgttagtgttcttcaaggttctaaacaagaagtagagaagtaggataagagggcaagttgcaggtttaggctgtgagttgaagggagcacttgaaaggagagattatagaataagttttcaagaaatttggcaatggattttttttttttttggtccaaggcgcatgctcatttatataccagaattggctagagttcatgaggccctgaacaaatatcacacacaagcaagtacagtcttccaaagttcttcacttttgtctttttgtgtagcttgatgtaaagtgtggctcttaacatattctctttatgcttagagatataataggcacaatattacttttattatatctgtaaccattacttcctttttgattatgttgtttataaagtgccaattaatcactactatagtttggagttacagtatctgacttaacatatttgtacaattgattgttgagccgggcattgattagatgaattaactttcaacaaagtttatttgaacttcagtcattggtggatatttaagaagtacagattatgataactgcttttataggaaaggatgcttggtacattttttcatatgacatagatcttacatttttatttattctggataaatatctgataatgtcaggttcattggattcttcaaaataacctcattgtctctctcttaagagggagagggaagtagaatatgtgtaaatttatataatgttgttttctcaaaactgcacctatgtgaatgaaacagaaacatgttcagggacagttagtgtttcaaattctcccaattagatatggagcatatttattatggagcatatttattaagtagaaaattattatggtctaattccaaattttttatattttaggtcctatattgcgacctagttggactttcgtttaaaaaaaagtctaaattatgcagaagggagacgtcaaagaaaaaggagagactgaagaacaagaaggctgaaagtaatgaaaatagaattgctagacagtgtcctggagggacaagagggaatggggtagagagagcacaggtaaatggatgagctttggatgagaagaggaataactagtctttggaggaagaggaaaatggatgaataccggttcagatatagattatttgtcttagtgacctggtttatttgtaaggactaacccattttaggcagttaattaaattaatcatttaaaaggtgagattcctcaattctgacttgagatggacctaaatttgtttattctgtttaagtagtaactttatttttttagtgacagatttaagaagtatcttactggtactattccattggttttcttatttcaattttataaataatgtgtttactgagtttttttataggtgcttcttaggtttctaatagacttctctaaaatatattggtttaaatggcctttaaagttgataagcagaaagatacttgagtttatctagtccaaaccttcatcaggaaagctgtgattgagtgatttgtctgaagtcatacagccacttagtagcagagtaagagaggaatattggttttatggttcttggggtaatgctgtttcccttatgccaactgattgcataagggaactagtgtactgatttcagcgcccatacttgtgtatgtcctttgagctagagtatcaaaggacttcaaaacttcaaaactagactttttaggttatttaatattccttcaacaaatgtttctcagctgtctaccgtatgacagtcactgtttaagatcttgaagatcaacaagttcttgggcctcaagaatgagggaaccaaaaaataaacactgaattaaaaatgaacagaaatttagataatcatcagtgctatcaaagaaacaaaatggagaaatagaatatggtagcagaactatgtgctttagatagaatagtcaaggaagatttctctgagttagtgatatttgagctgagactgaatgataaggcactcgccattgaagatatctaggagtgtagcattccagacaaaagccctaaacttgaacatggtgtggcacagttgatgaatgaaaaaaactaaacactgaccggggttgggggaatggaaggagaagagatcagagagaccattaagtagggctttgtagactgtggtatagaaagataattttattctaagtgaaatggtgtggtattggaggaggagagtgagtgagtaacctaaagaatatgtttcaaatatcacactgcttgatggagaatggattgtaggagggccaaaagtggaagcaggggcaccagttaggcaactctcatgtttgttcgaataaaagattgtggtggcttggactcggtgattctggtcaaggcaaagagaactggttggatttgggatttattttggaggtctgctggatttgctaagagactgggtatgggagtttggggaaatagaggatggtgagagtaagagagaaaaatggtagactggggaaagggcacatcttggggaaagaaatcagatggtttttctgggacttgttaaatttgaaatgcctactggatatccaaggagacagttaaatagtcacatctagtgtttgttgaggagaggttagacctggtgttgcagatctgggaggcgttcgcattaacaccatatactgcagagttggcaaagagaaggaagagaaggtggtttggaattgaggcattgcatgtttagaggtagccagggggagaagtcagcagagagccagtgacgtaggagaaaagtcagaaatactgtgttgtggaagccaagagaagagagcattttaaagagggatatttatgttcacttgggttaaatcatgctgccaggccgggtatgatgaaaacagagaagtgaccgttgatttggcaatgtggaaggcattagtgtcctcagctagagcagttttagtggcatggtggggtcagaagctgattggagagggttgaagaatgaatggaaggtaagaagagacaacgactagagatgatgcttttaagaagttttttttccttttctttttgtgtgtttttttaagttgagaaattcccatcatcgtttatatgctgatgggaatgatcgctagagaggaaaattaatggtgatttgggaaagaaagattaattgtggagtaaagtccttgaggtagcactggtggaatgggatagagagcacaagtagagggattaccctttcataggagtggggatgcaattacgtaatataaaaaagggacctcaagccactttacacacagcccctcccttcagtcttaacaatctcctttagaccagcttgatctttctgtaatcactagtgtttttttttttttctgtgccacattaatatgttctttcagattgaagtcatcctatataaggcttagtatgaagcagttgatgatatttaataacaattttaaattttatgccaacaggtgaagcaaaaaatttattgccatatcttggaccccacaaaatgagagattgtttctgtaccataaatttggaccaggaagaagtttatcgtacccaagttgtggaaaaatctttaaggttggtagaaaaaattggtaaattataatttttactatatagattggtaaatattatgcattttccagattataataatcaagaagacaagacagaaacagtgcttgctttcatgtggcttttcattgcctcaaaatgtatcttcctcttaattgttcctaattttatctttgttttctggagaaaagttttttcacatgacaggctaaatattgcctattcgtttgaactttcctcaaagtacatctttattttatttatctaaagaataagttacttaaagttcatagaagttgcttaacttagtagtgcattatcagggaatgaattctcagatagatgtctcatctttgaaagtgtaattgccctttgagagtatcatattaaattctaattcataaaactggaatataccacctctgcaccgtagcaatgtgaacataattctagtgcagagttgtgctgagaatcttgttcagagacaaaagtcaaaataaggaggccgggcgtggtggctcacgcttgtaatcccagcactttgggaggcagacgcgggcagatcacttgaggtcagaatttcgagaccagcttgggcaacatggtgaaaccccgtctctacgaaaaatacaaaaattagttgggcgtggtgctgggtgtctgtaatctcagctacttgggaggctgaggcaggagaatcgcttgaacccaggggtcggaggttgcagtgagccaagattatgccattggactctagcctgggcaacaagagtgaaactccatctcagaaaaaaaaaaaaaaacaaaaaaacgaaaaacagggtgtggggtattattggaatgagcatgtggtggatgaaatattgaatgccatgccttatctgaatcatattttaggtcagttgtattttagggatctgtttttttttttatgcctttaaaaaaatatctttcttttacatttgcctttgaagtttccctttatgtctttattttcattttttataattttaaatatctattgaattcttcttagaaaaggtattgtataaaactgaaaatactttagtagcccaaaaacatttcaaggagtaaacttgaaatctttagtcttaattctcatattgttcttatttggctttagaatgtactttaaacataatatttgaatgtggatgtgatatataaaggaaattctgcatttataattgtttagaaaataatgcaaagagatacatacctacacatgtcttgtctttcatatcatgttttcatatcatatttgactaatagttctttttgcattgatttctatgttgaaattaattagaaggctctagttactttgtgagaccaacttttaaaagtttagtttggttacatttgaagggaaaaatatagtgacaaaagttcaccaggcattttaacaactaaaaagctgaaccaactgttttctagacaagatcagatatgacttctgtaggagtattttactttatatttcagcttctcatttagttatgacatcataaagatactgcatttcatagcgatatttctagagaatctttttgttctttaaactttctcaggaaagaggtacacttgacaaaagaaactatcatttcagagattcgcgtcttcatagaagaatcatagaaggataaatatatcaaaatggcattcttaaaatgaacttataaaaataagctttgcaacatgaggatgggcaaagatttcttgctttgaatgcaagaagcaccactaattataaaagatgaaaattggtaaattagattttatcaaacttagaggctccttttctttaaaagacactgtcaagaaaattaaatggcaagccacacctgggagaaagtattctgacaaaagacttgtatccagaatttatttaaaaacaaaaaccctgataactcaaaagaagaccgatggccatttaaaatatggggagaatacttaaacagatatttcagaaaagatatggccaagagcacatgaaaaggtattggacattgttagtcatcaggaaatcaatttaaaaccatttttgtcactatagattctagaacataatctgcagtgatagaaatcatatcactggttgcctgtaagaatatggtgggagtgattgcagagtcacaagggaactttctggggagataaaaatgttttgtatcttgattataaggtagagattacataggtgtatacatttatcatgttacattcactagaatagctaaagttaaaggctgtcagtaccaagatgtggaacaactggagcattgctgttaggggtgtaaaacagtacaaccactttgaaaacagtttgacagtttcttgtaaattacacattcacctgccttttaactcagcagttgcattctcagtaatcaaaagcatgtgtctagaaaaagctttatataagaatgttcatagcagctttacttttgatagcccaaactggaaacaactcaaataacatcactaggcgaatggatttggaatgcaatggaatactatgcagcaattaaaacagttgaactactatgtacacaacaacatcgaaaaaatctcatagacattaagctgaatgaacaaagctggacatgagtacatactatatgattctatttatgtgagattttaggatagatgtatagtgatagaaaacacatcacaggttggggcaggtatgatggggtaactgaaggagaggcataagagaactttctggggagatagcagtgtcctttattttgattggggtggaagctacacagttgtataaatttatcagaagtcatcaacctctatactttaaattggatttttattgtttgtaacttatagctcaataaaactgatttaaaaataccttgttttaattttttaaaaatattttttaaagttgattttaaaattgcatattttaattttttaaaaatagcttaatttaaaaaaaaattttgaagtagcctttcacataacattggctgttttaggtattatgtattgtaaataatacagctttacacatttctaagacaaggatggtatgaatgacactatcctcacctctcaaatggtccaccttaggtgagcatgaccccaggcagttactgtatcttctatccacaggactgctgaaaagctatttgttcagaactcatactggcaacttagatcccttcagtgttcagcttggtttgtatagaacttagttgaaatttagcattgagaattattttggggcttttcaaattcttttcaatggcattttagtccataatttcattaactttattgaaagtgatattatttggccaggaacattagctcactcctgtaatcccagtactttgggaggctgaggcgggtggattgcaaggtcaagagattgagaccatcctggccaacatggtgaaaccccatctctactaaaaatacaaaaattagctgggcgtggtggcatgtgcctgtagtcccagctactcgggaggctgaggcaggagaatcgcttgaacctgggagctggaggttgtggtgagctgagatcacgccactggactccagcctggcaacagagcaagactctgtctcaaaaaaaaaaaaaaaaagtgatattatcattctcagcaaactatcgcaaagacaaaaaaaccaaacaccacatgttctcactcataggtgggaactgaacaatgagaacacttggacacaggaaggggagcatcacacactggggcctgttgtggggtggggggaggggggagggatagcattaggagatatacctaatgtaaatgatgagttaatgggcgcagcacaccaacatggcacatgtatacatatgtaacaaagctgcacgttgtgcacatgtaccctagaacttaaagtataataaaatatatatatattaaaaaaagaaagtgatattatttgagtatttatacaattattattgaaagtgatattaattattatttattttatattatttgaagtaatgagctttccttttctttctagcccatttttcagtgaagaattttactttgagattccaagaactttccagtatttgtctttctatgtttatgataagaatgttttacaaagagatctccgtataggtatgtactattcataattatctttaatcacaatgttaatgtttatattcattcgttctcttagtatagttttgaaaattgcagaataatatatgctcaacatctctgatctttttctgtagactacatgttcatttgtgaaatttcatttttaatttgtatgttcagcttatatgacactttctcagggaggcctttgcagctcccctagtcactatgtcatatgtttttataattcctgatggttccctttccatggtactcattatgcttattcattagttggctgtttcatatctaggttctctagttaaatgtgaaatttaaaagggcagggactctttttttgtttttttttttgacacagaatcttgctctatctcccaggctggactgcagtggtgcgatcttggctcactgcaacctctacttcccaggttaagcgatttctcctgtctcagcctcctgagtagctgggattacaggcgtgtgccaccacgcctagccaatttttgtatttttagtagaaacagggtttcaccatgttggccaggctgatcttaaactcctgcaggaaatccacctgcctcggcctcccagagtgttaggattacaggcatgagccaccacgcctggccgggcagggactctttcttacggagcaccttacacttagtaagtgttgggtaagtatttgtttagtggttcaaataatgtttttatagaaagattgcagttttgatccttccaaagaacatctgttgttgaggtttttctaatagaagtaataattcactttaatctatttatacattttcttcctgtctgtattagtgactgtattagtccattctcacactgccataaagacatacctgagactgggtaatttataaagaatataggtttattggctcacagtttttcaggctgtacaggcttctgcttctggaaggcctcaggaaacctacatgagtgaaaggcaaaggggaagcaagcacatcttcacatggctggcaggagagaggagagttgggatgtgctacacacttttacaataaccagatctcatgagaactcactgtcatgagagcagcaaggggatgtctgcccccatgattcagtcaccttatgccaggcccctcctccaacagtgggattacagtttgccatgacattttcgtggggacacagagtcaaaccatatcggtgaccaataaatatatttctctttttttttgagacggagtgtcactctgtcgcccaggctggagttcagtggcgcgatctcagctcactgcaagctccgcctcctgggttcacgccattctcctgccacagcctcccgaatagctgggactacaggctcccaccaccacgcccgactaattttttttgtatttttagtagagacagggtttcaccatgttagccaggatggtctcgatctcctgacctcgtgatctgcccacctcggcctcccaaagtgctgggattacaggcgtcagccactgctcccggccaataaatatatttcttaaataattgtcagactagagtgtgatctgtgggcatgaactagaacagagctaactggccacatatgtgtcacattcctgatctttgcaccactatctttgtattttaatcataggcagaggtctaatttacatttattctctttctttttagtatcctaaatttcatctccctttccttttttatttgaaatatggtcaagtctcctacagcttaaaaaattaagcattatttggccaggtgcagtggctcatgcctgtaatcctagcactttgggaggccgaggtgggcagatcacgaggtcaggagttcaagaccagcctggccaatgtggtgaaactgtctctactaaaaatacaaaaattagcctggagcggcggtgcgcacctgtagtcccagctactcaggaggctgaggcagaagaatcgcttgaatccgggaggcagaggttgcagtgagctgaggttgtgccactgtgctccagcctcggcaacagagcaagacaccatctcaaaaaaaaaaaaaaaaaaaaaaaaaaaaaaaaaaaattaagcgttgtctttgtcctcttaactaacttctgatgtttctctgtgtttgatattgaactccttaacaaatggtctgtgtcagtcctctgcttgctacttatttcttttaaaatctctataatctggcttctatgtttttttgataaacctttcttgaaatttgccaacatcattttaatcaaataacctttaaaacaatatgtttttcttaattataaaactgttatatgttcttagtatttggtagtgattctctacagaaataactacagttaataatttggtgtatttcttccattctttatttcatacatttgtattactacattttattcagattttttccttttcaattaataccatagtgatcctttccccatatcattaatatttgttaaaactatttgttacataatatcctttatagaaaagtgttttattttaaccacatccttgttggtgaacatttacatttccaaattttgggcatcctcaatggtgttgctatgaacaaatgtcctttggcataaatttttgcatgtctctttttccccaggataaattcctagaagtgaaaatactgagtcaaggggtatgaacatttttatgatt

SEQ ID NO: 649 - protein, 599 aa, Homo sapiens
MSGPCGEKPVLEASPTMSLWEFEDSHSRQGTPRPGQELAAEEASALELQMKVDFFRKLGYSSTEIHSVLQKLGVQADTNTVLGELVKHGTATERERQTSPDPCPQLPLVPRGGGTPKAPNLEPPLPEEEKEGSDLRPVVIDGSNVAMSHGNKEVFSCRGILLAVNWFLERGHTDITVFVPSWRKEQPRPDVPITDQHILRELEKKKILVFTPSRRVGGKRVVCYDDRFIVKLAYESDGIVVSNDTYRDLQGERQEWKRFIEERLLMYSFVNDKFMPPDDPLGRHGPSLDNFLRKKPLTLEHRKQPCPYGRKCTYGIKCRFFHPERPSCPQRSVADELRANALLSPPRAPSKDKNGRRPSPSSQSSSLLTESEQCSLDGKKLGAQASPGSRQEGLTQTYAPSGRSLAPSGGSGSSFGPTDWLPQTLDSLPYVSQDCLDSGIGSLESQMSELWGVRGGGPGEPGPPRAPYTGYSPYGSELPATAAFSAFGRAMGAGHFSVPADYPPAPPAFPPREYWSEPYPLPPPTSVLQEPPVQSPGAGRSPWGRADSLAKEQASVYTKLCGVFPPHLVEAVMGRFPQLLDPQQLAAEILSYKSQHPSE

SEQ ID NO: 650 - DNA, 1800 bp, Homo sapiens
  source 1..1800: mol_type = genomic DNA
atgagtggcccctgtggagagaagcctgtcctggaagccagccccaccatgagtctgtgggaatttgaggacagccacagccgtcagggcaccccaaggccgggtcaagagctggccgctgaggaggcctcggccctggaactgcagatgaaggtggacttcttccggaagctgggctattcatccacggagatccacagcgtcctgcagaagctgggcgtccaggcagacaccaacacggtgctgggtgagctggtgaaacacgggacagccaccgagcgggagcgccagacctcaccggacccctgccctcagctccctctagtcccgcggggtggtggcacccctaaggctcccaacctggagcctccactcccagaagaggaaaaggagggcagcgacctgagaccagtggtcatcgatgggagcaacgtggccatgagccatgggaacaaggaggtcttctcctgccggggcatcctgctggcagtgaactggtttctggagcggggccacacagacatcacagtgtttgtgccatcctggaggaaggagcagcctcggcccgacgtgcccatcacagaccagcacatcctgcgggaactggagaagaagaagatcctggtgttcacaccatcacgacgcgtgggtggcaagcgggtggtgtgctatgacgacagattcattgtgaagctggcctacgagtctgacgggatcgtggtttccaacgacacataccgtgacctccaaggcgagcggcaggagtggaagcgcttcatcgaggagcggctgctcatgtactccttcgtcaatgacaagtttatgccccctgatgacccactgggccggcacgggcccagcctggacaacttcctgcgtaagaagccactcactttggagcacaggaagcagccgtgtccctatggaaggaaatgcacctatgggatcaagtgccgattcttccacccagagcggccaagctgcccccagcgctctgtggcagatgagctccgtgccaatgctctcctctcaccccccagagccccaagcaaggacaaaaatggccggcggccttcaccttcatcccagtccagctctctgctaacagagagtgagcagtgcagcctggatgggaagaagctgggggcccaggcatccccagggtcccgccaagagggtctaacacagacctatgccccatcaggcaggagcctcgcacctagcgggggcagtggcagcagctttgggcccacagactggctcccacagacgctggactcactcccgtacgtctcccaggattgcctggactcgggcattggctccctggagagccagatgtcggaactttggggggttcgaggaggaggccctggtgagccgggcccaccccgagccccttacacgggctacagtccctatggatctgagctcccagccaccgcagccttctctgcctttggccgggccatgggtgctggccacttcagtgtccctgccgactacccacccgcgccccctgcctttccacctcgagagtactggtctgaaccatacccactgcccccacccacatcagtccttcaggagcccccagtgcagagcccaggggctggcaggagcccgtggggcagggcagacagcctggccaaggagcaggccagcgtgtatactaagctgtgtggtgtgtttcccccgcacctggtggaggctgtgatggggcgcttcccacagctcctggacccccagcagctggctgccgagatcctctcctacaagtcccagcaccccagtgagtaa

SEQ ID NO: 651 - DNA, 10998 bp, Homo sapiens
  source 1..10998: mol_type = genomic DNA
caggaaaagtgtacctggccccgggggtggccaacctctgtgtgacggctttaagcacagtgtgtcttgagggggcctgactccatctgaaaagtgcctgtctggatgtacctgtctataaccatggacctgcctccaaggtgcgtggaccaacctccgcgtacctgattcactcgatgcgcacctggccgtacgtagcttcatcaggcagggtgtacctgtcaagttcttaggtccgagtgttcgcggctttacctgtcctggtaccgccgtccgcacctcggtcagtgcgtccccggcaggtgcgtgtacctgattcagtccgtgcttatcttgcgcatacgggccgttcagtgtcccgctcggagctcgtcgccgccgcagccttgaggctccgacccccgcttgggccccgtccggcgcgcagcggccgcgggggcggggccgcgacgcgaggagcggagcaggaaggggcgaggcagccccgcccccggggcggtctcccgggacggccccgccccttgcccgcttccgcgtcagtgcctcaccaccacctgcccgcgcgccgccccatataaaggcgccgccgtccttacccccaggactcggccccatggagacgccgccggccgccgctggcgcatggcggggtgaggcgcggcggggagggtgcgggcctcggcggggaagcggcagggagcgctccggcggggtccgagccgagccgaggggaggggacgggaggggacgggaggggtggagaggggaggggacggaagggtcggggtcctgttccccggcccgccgggcctcaggacccctccaactttgcccaagttgggagagccggggaagagcaccaggttcctgatcgggatcgcgggccgagcaagcgcgggtctcgggccgggacagcctcggcgtcaccagctcccggcagccaaccaaagttttccagcaacttttctccccacgggtcaccccagaaacttgccctccccggctccgggagtccggccatgggccttgcgctgcctgggcctgagctctgagtgccggacgggtgggcgaaagtggtggcctcagtggggaagccttgggccccgcaacgcacttccagccccaggattccatctgagagccccgtccctgccttctgggtcccctgggttggcgtgggggttcgaggctttacagctggggtagttccagtcttagttcagactaagttccgatcttcgagccaccagctaacagctggatgaccttgagcacgtttttaatgtctgtgcctcagtttctccctttatagaatgggaatgggaatgcctagctgggagagcttttgagaggacaacctgaactaataacacgatgcagtgtgtagtgccaccaatccctcatcctgctggatgtggttttgggagggaggttaggagagagcgctattcaccgtccctaaccctgttggttgttcagtaggagctgtggcgcggggccttccaggagtctgagctatgagtggcccctgtggagagaagcctgtcctggaagccagccccaccatgagtctgtgggaatttgaggacagccacagccgtcagggcaccccaaggccgggtcaagagctggccgctgaggaggcctcggccctggaactgcagatgaaggtggacttcttccggaagctgggctattcatccacggagatccacagcgtcctgcagaagctgggcgtccaggcagacaccaacacggtgctgggtgagctggtgaaacacgggacagccaccgagcgggagcgccagacctcaccggacccctgccctcagctccctctagtcccgcggggtggtggcacccctaaggctcccaacctggagcctccactcccagaagaggaaaaggagggcagcgacctgagaccagtggtcatcgatgggagcaacgtggccatgaggtaagtgtcacttctgtggccaggacacatgaggttcgcatctctcctgtggccaggacacatggaaggatgactgtctctgcagctctggtgggctggaagaagtgacttccttcttagggactggtctagagggagggaaagccttttatgaggctagggtcgcgctactggtaagtgacagaggcagggttccagcccaggtccctctgtccgcagagcttaccttatgctgtgggtccctccctgaggccagcactgtgtctccactcctctcctgtaatgtgaggcagggctgtaaaggggaccagcccgtgggcagctgctcactcacccctcggaacctgatctcaggtgggtgttgtgaggagggagtgtgcggatcccggagaggagcaagcgttcaggaaccatagtagtggtagtaggcagtggtagtagcagttgttgttgttatttcaggggctgggcttctgaggccttcttgtctcagacctgggctcccacgaaaacaggtccagtgactgtgtccaagagtgacctcaaggctgggtccagctttacatgggttgtgggcaggtggcctgatgctctggcctcaggcgagctgcaacttggatccctactgactcagctgaagcagcctgggctggaccagtctctggaggttccccggggccagagccaggactcagcccccagtgactcccacccccatcccccagcacaggaatggggtggggaggtaggggcagagagggaagccagggctgctgctgaccttgggaaacccagacttctcccgtcaatccaggctccaccctctggccccacttttttcccagttccctccaaggcaggctgatgagtcagtgctgggtggatggctcacagggaaaagttcctgttggcatggacggggagaccccagacacagggttgagaagggatgattttctggctgccctgagggagctcctaggtgggctgcccaaggctggcatgacatcagcctctgccctccctaatttgtggcccctgtgggacaagttcactgtccagctggccctggcccagctcagcaggcatgcagctgagtgctcttccctccttctgtcaccttcaggccagtcttcctctctctgacttgggctgagcctggatgggaggctgagaaaatccagtttccatgccaagaggcagcaggtcacagcccatgcttcgagattagaaggggtccctctcagtgtccagcctcatgtagctgggctaggagctaggttggatctgtgtgactccttcctctggaggtatgggccaggagcggctgagccctgggagcagccatatgcagtatgtgtttgtatccagaaggaggagggacatgggaggaggggctgtgatgaggggtgctcagaggagcctgctcctgagaagcagagccacgcacccacctcgggggtttctgagctggggtagtggcaggaggggaattccagcctcaaacttcctgtctcagctgctactcggttcctgcccggccaccccccctccccaggggcaggcgggctagcccccccatcatatgcaaatcatggggaaattcacctctgtttccttctaagggaatttttttccactcgccaggcccagcccaggcatatcttttcacctggggaggctggcccagccctgccttctgtcctggggcaggagcagcctagctggagtcttctacacacacatcctatcagtgtctgcttagcccggctgggggaccctgaccttacaggcaaagagaactggaatgggggcagggatgtctggttttcctgtgccagcagcgcttcctccagtgcagtgaaagagactaaagctagctgtaggggggcactccaggcctcatgtgctctaccaggaggagggctctgatagcgcccactgatcagtttttccatctgctgagggaatattcaggtgctagggctgctgagaaccgacttgtcccagccaagattttcagtgcccacaggcagtgcactgccctgagagccctggcatcccattagttcccagtgctccaagatactagcctaggatcatgtgcccggagggaggcaggtgggcggatacatgcgcacactgcatacctgagacaaggagccaggcctgggatgacccagctgccatggttttgagaggcaggccagaaggcccaaggaaggggggtgatgtgatgggggaagcactgggcattgtgaagacacagaccagggacctgacctattgtggcaggtcagggaaggcttctcagaggcagtgacatctcacaagggttctgaaggaagagcaggagtttgccagcagcattgtttctcccgttcgccacctgtctctcataacacactttgttcaaactcaattttgggagctttgttctcccaaataaattctggatcttctgttagagacaggaaggcaaccgagtggcccagacctgggttcgagttctgactgtctcttaccactagccaggtgaccttcctttccttcacggtagcaagccctataagaatgaagccatatatctggccaccagcgggagctcagtgcctgcgaatccctgctcattccctgcgatcagggtctgtgcctgccttcgtacctgcctgagcattgacgtacagggtagtgataagcataggccctgggcttgcgtctctcttccaccgttaactgctgtgtgaccctggtgactaagctgccttctctggaccacagttttcatctgaaaaacagggaaggagttgatgatggtatagtgccctcctcacaagcttgctgatgattcagtgttagacacttataacagggcctggttcacagctctcagcaaatgggaacttttattataagcaggctggcagatgtggcagagggaccgggaaggatgagtgctgccctgggctggactttgtctcccctacaatttagagaccttcagaccctggtgccccagtcttgcccccaaatagcctccatggcccccagctgccccacctccctccctagcttctcttagggctccagctatcaccccttacctcccccactcccattaaagacacccacaggatgtggttggccctggacttgcctcttttgcgtaacatttattctgttttatttgccaaatacgagagtctaagctgttcactgagggggcagtgagacgtggggctgctggtcctaggagctcttccatgacacctagtgttacctgggagccccaagccccagtcccccatccctcaggaaatccagttggaacccctactttgcagggccatctttggcctgaagccaccaggaaagctgtcccactgactgacccctcttaaggaagctgcagactgctgggcccattttcagatagaggaacggagagctgcggcagcccaggagccctgccaggcttccttctgggtgcagccacctgtgggtggggcgcggcctcgtctgagaccaaggcagggcccatgccttactcagctgtccttgctaagagtcccctagcatcttcctgatggtctttctgccttggggtgaagaggcatttgggggaattgccatcttgggaggaaaagcagtatcctttcactttcagactgaaaggctcctggggaacttgcttcactccggcgctttctgtcccatgctgaaggctggagtcgccagccccttcccctttgcctttctcaggccccagtccctgaggtgtgtgtgaggactgaactttaatccggaacaatctggtttctcctcggtcagcccagccggtgcttcccccgcccccacccacgctgcaagaggcgagggaggggtggtgactcagtgtgcatgtgtacatctgtccctgtggtcccggcagctcgccgggtggggcaggaaccagaagtctcgcggcacctttcccccacccccaggtgtgttgcaagtggcctggccctcccccaccgtggggagcagtgctgccagcttcctgggcgcttcctcactttcaggagatggagcctcagggaaagtcccagcggggcctggccatcctggagctgtgggaactggcactgggaatggaggccttggccttgggccccacctgcagagggccagggcctgagccctggggaaaggggaaggggctggtgactccaaaggggaagggactgctcactaccaccaccaaagccagggcaggggtggggtgtgaccacctccctcctcctgctcaggcctagggggtggcaggctggccatcagtgtgggctaaccctgtcctctccctcccagccatgggaacaaggaggtcttctcctgccggggcatcctgctggcagtgaactggtttctggagcggggccacacagacatcacagtgtttgtgccatcctggaggaaggagcagcctcggcccgacgtgcccatcacaggtgagtggtgcctctggaggtgggatggtcttactgccccagcagccctggttctccccaagagagaccctctgggagtgacctacaacttctagaactcaagcagggaccagcatttcttttctcagttttttctgtccttagcaacctgctctgaatggtggtcattggaggtcaccttgtccagtcttctgcctcagatctggagcccctccctcatcctactggtgggcaggtcgctctttcaacatccccagtggcagaagcgcagtatcacatagtggttaagcctgtgggctctgagtcgagacagccagagttggaatcctggctctgtcccctcttggcgccctggcctggacagggacccctcttagccctgctctgagccacatgctcctcatctgaaacatggggtcggtgtcagcagggggtgttgacagcattgccttcctcgtgaggtcatataagttaacacacggtaagtgctgagaagagtacctggcacatggtagatgctcagtgtatgttagctgttaccactgttcttgcaagagcccccagcctttggaggtaaaaactgaatcagtttctctagaagtcttgagatctgggggcagcctgtctgggactgtaggctccaggaagaggggccctttccacttgcacacttctgtgtccctgtggtcccagcagctccccaggtggggcatggtgagtggcctgaccttttcccaccatgggatttagcgaccttgtcctggcaatgcaagggacagagccaagatacttctcccaccccagagcaagctgcggctcattcacggacccctcagaacaggctggatgaaagccaaagccaagaccacatctggcttgaacaggcctgatgtccagaaggagaaaaggaacaaggccagctctgtgcttggagcctctgccatgcaggccctgccgcctgtgttcagatgttcttggtcttcaggcagcaaactgtgccacgccaagggaggggctggggcatggaagaggcctcagcagagttagttcttgccccggtgaccttggcgttaaccactcctgtgtgtggccatcagcaggttagggagccctgtaggcctggctctaggtcccgctgggccctgacctgtgtgcacccgtcacctcccagaccagcacatcctgcgggaactggagaagaagaagatcctggtgttcacaccatcacgacgcgtgggtggcaagcgggtggtgtgctatgacgacagattcattgtgaagctggcctacgagtctgacgggatcgtggtttccaacgacacataccgtgacctccaaggcgagcggcaggagtggaagcgcttcatcgaggagcggctgctcatgtactccttcgtcaatgacaagtatgttccctcccagaggccctgacagacttggggtccacaggggaagccagaggtgcccttggcaagggtggagctgggggctgggctctgcggggccctgtggccatgggaggttgcgggtcttggctccaggcagctttgagagtgagacggatagctcaccacataggagaaatcagaccgggaccaggcaggctgtggggtggagagagtggctaatttgggagatagagccgtagcacttatgaggggatgtatgtggttgatggttccaggtggcctctctacgaaccaacatggcatctctcgagcagaggccatgggccagtgggtgcgggctgccatcccccgacgacctcagagagggagttcccctaaaggtgcccatgggctgtggccctctagaccggggatccctttctcctcccttggtatgatcccacccatagagcagttttgcggggtcctggacaggccccagttttaggtgtcactctcctattcttcccagcaaggcttgccatcggccccttctcagcaattagaagtccctgcatggctcccacctccagagagttctttgcaccctctgcaggtttatgccccctgatgacccactgggccggcacgggcccagcctggacaacttcctgcgtaagaagccactcactttggagcacaggaagcagccgtgtccctatggtatggaacccagcctgccctccccggccctcctcactcctgcccttcctctcacctgtctgcctgtgccctgttttcctcttggggacctccaccattggaccacccaaccccgtttcctgtgccaccccttccctgctctcatccctggttctgaagtgcccctgcttagagtccctcttgattcctcttccaggaaggaaatgcacctatgggatcaagtgccgattcttccacccagagcggccaagctgcccccagcgctctgtggcagatgagctccgtgccaatgctctcctctcaccccccagagccccaagcaaggacaaaaatggccggcggccttcaccttcatcccagtccagctctctgctaacagagagtgagcagtgcagcctggatgggaagaagctgggggcccaggcatccccagggtcccgccaagagggtctaacacagacctatgccccatcaggcaggagcctcgcacctagcgggggcagtggcagcagctttgggcccacagactggctcccacagacgctggactcactcccgtacgtctcccaggattgcctggactcgggcattggctccctggagagccagatgtcggaactttggggggttcgaggaggaggccctggtgagccgggcccaccccgagccccttacacgggctacagtccctatggatctgagctcccagccaccgcagccttctctgcctttggccgggccatgggtgctggccacttcagtgtccctgccgactacccacccgcgccccctgcctttccacctcgagagtactggtctgaaccatacccactgcccccacccacatcagtccttcaggagcccccagtgcagagcccaggggctggcaggagcccgtggggcagggcaggcagcctggccaaggagcaggccagcgtgtatactaagctgtgtggtgtgtttcccccgcacctggtggaggctgtgatggggcgcttcccacagctcctggacccccagcagctggctgccgagatcctctcctacaagtcccagcaccccagtgagtaagctgcctgtggctggcaagggcagcacccccagcctccaagggccgtcaggctgggctttgggccattgagcagcccattcccagccctgaggcccaccccagaggctggacagagggaggattcaagtcgggaaggaaacccacaaaccaaagatactgtaggattggttctggcccatgcagcacctctagctgtctgcctcagtgggtcagaagcgatcaccctgttgatacacattgtatctctgtagtttaaggagacgctgccggtaacggcgtcggtccgtggctgaggcccaaaccgtcttttctctcagagggtggggagggaggtgggggcagcagaggcctgggctgggtgccctgtgcacgccaccccacttccgccctacccctgggacgttggccttggctggctagttgggcaccgtgtgcctgccctccaagggcctcctctacgccaatgaggcctcatctgtgctctcgctgggcacgtggcttcatgtcagtaagcaagatgcttcttaataacccaccttctgccccactctattccttatcctgctgcccctgtaggggtcaagggccctccgtctacaccctcttcttctcctccatcctttattcagagtcatctcgcccttccccatgggtgggggaacctgtgtttgtttgtgtgcacatgtaaattttaaatattttaagcagaaagtccttacctcctgtaacacatcaataaagtacaatcattgtgagccctttcaagaggtgattgtctttgttatgctcagggctttgggctggcctctgggtgaggaaaggccagcaggtatgcaccccgacctccttcaccccaggaggaagcccctccacaccagctccctgacccttctctggaaggaagatttctaacaaacattcaccaggaatgcatagctccttggggatggggcatctttcccgaggccttggtctgggccttgttaggaggtgcccatggacgcacgagcgggcagggggctggagggggcagttaggcagcaaaagtgtaaaaggatttggagtccagttttatctgcaaaaagaaatcttacttacaatatacttgggcttctgtttgtttttgtgggacaggaagctaaaataccagactgtccagttcattatcagccacttggcaatgctgaatgacttgcccaaggtcccgcagaggaaggacagactggggcagggccttgagtcctggttctggtccccaaaccaggggggcaggaggggtgggcctggacactagtttgcagcaactcagggccctgcagggatgggggaggtgaaggtaccctcagccccacacctcacaactct

SEQ ID NO: 652 - protein, 1134 aa, Homo sapiens
MPVQAPQWTDFLSCPICTQTFDETIRKPISLGCGHTVCKMCLNKLHRKACPFDQTTINTDIELLPVNSALLQLVGAQVPEQQPITLCSGVEDTKHYEEAKKCVEELALYLKPLSSARGVGLNSTTQSVLSRPMQRKLVTLVHCQLVEEEGRIRAMRAARSLGERTVTELILQHQNPQQLSSNLWAAVRARGCQFLGPAMQEEALKLVLLALEDGSALSRKVLVLFVVQRLEPRFPQASKTSIGHVVQLLYRASCFKVTKRDEDSSLMQLKEEFRTYEALRREHDSQIVQIAMEAGLRIAPDQWSSLLYGDQSHKSHMQSIIDKLQTPASFAQSVQELTIALQRTGDPANLNRLRPHLELLANIDPSPDAPPPTWEQLENGLVAVRTVVHGLVDYIQNHSKKGADQQQPPQHSKYKTYMCRDMKQRGGCPRGASCTFAHSQEELEKFRKMNKRLVPRRPLSASLGQLNEVGLPSAAILPDEGAVDLPSRKPPALPNGIVSTGNTVTQLIPRGTDPSYDSSLKPGKIDHLSSSAPGSPPDLLESVPKSISALPVNPHSIPPRGPADLPPMPVTKPLQMVPRGSQLYPAQQTDVYYQDPRGAAPPFEPAPYQQGMYYTPPPQCVSRFVRPPPSAPEPAPPYLDHYPPYLQERVVNSQYGTQPQQYPPIYPSHYDGRRVYPAPSYTREEIFRESPIPIEIPPAAVPSYVPESRERYQQIESYYPVAPHPTQIRPSYLREPPYSRLPPPPQPHPSLDELHRRRKEIMAQLEERKVISPPPFAPSPTLPPTFHPEEFLDEDLKVAGKYKGNDYSQYSPWSCDTIGSYIGTKDAKPKDVVAAGSVEMMNVESKGMRDQRLDLQRRAAETSDDDLIPFGDRPTVSRFGAISRTSKTIYQGAGPMQAMAPQGAPTKSINISDYSPYGTHGGWGASPYSPHQNIPSQGHFSERERISMSEVASHGKPLPSAEREQLRLELQQLNHQISQQTQLRGLEAVSNRLVLQREANTLAGQSQPPPPPPPKWPGMISSEQLSLELHQVEREIGKRTRELSMENQCSLDMKSKLNTSKQAENGQPEPQNKVPAEDLTLTFSSDVPNGSALTQENISLLSNKTSSLNLSEDPEGGGDNNDSQRSGVTPSSAP

SEQ ID NO: 653 - DNA, 3405 bp, Homo sapiens
  source 1..3405: mol_type = genomic DNA
atgcctgtacaagctccacaatggacggatttcctctcctgcccaatttgcactcagactttcgacgaaacaattcgaaagcccatcagtttgggttgtggccatactgtctgcaagatgtgcctgaataaactccaccgcaaggcttgcccatttgaccagaccactatcaatacagacattgagctcctccctgtgaactcagcattgctgcagctcgtgggtgctcaggtccctgagcagcagcctattactttgtgtagtggggttgaagacacaaagcattatgaggaagccaagaaatgtgtagaagaattagcattgtacttaaaaccgctcagcagtgctagaggagtgggtctgaacagcactactcagagtgttctgagtcgcccaatgcagaggaagcttgtgactctagtccactgtcaactagtagaagaagaaggcaggattcgtgccatgagggcagctcgatctttaggtgaacgaacagttacagagctcattctccagcaccagaatcctcagcaactctcttccaatctttgggcagcagtaagggctaggggatgccagttccttggaccagcaatgcaggaggaagctttaaagttggttctgctggccttagaagatggttctgctttgtcaagaaaagtattggttctgtttgtggtgcaaagattggagccacggtttcctcaagcctctaaaactagcattgggcatgttgttcagctcctttatagagcctcctgtttcaaggtcaccaaacgtgatgaagactcttctttgatgcagctgaaagaagaatttagaacctatgaagctctgcggcgagaacatgactcccagatagtgcagattgctatggaagcaggcttacgaattgcaccggaccagtggtcctctttgctttatggagaccagtctcacaaatctcatatgcagtccattattgacaagttgcagactccagcctcttttgcacagagtgttcaggaactaacaattgctctccagcgaactggagacccagcaaacttgaaccgactaagaccccatttggagctgttagcaaacattgaccctagtccagatgctcctcctcctacttgggaacagctggaaaatgggctggttgctgtgcgtacagtggtacatgggctggttgattatatccagaaccacagcaaaaaaggagcagatcagcagcagcctccacagcatagcaaatacaaaacatacatgtgtcgagatatgaagcagagaggaggatgccctcgtggggccagctgtacatttgcacactcacaggaggaactggaaaaatttcgtaaaatgaataagcgcctggttccgagaagacccttgagtgcctctttgggtcaacttaatgaggtgggcctgccttcagcagctatccttccagatgaaggtgcagtggatctccctagcagaaaacctcctgctctgccaaatggaattgtatcaacagggaatacagtaacacagcttattccgcgagggacagaccccagctatgattctagtctgaaaccaggaaaaatagatcatctgagcagtagtgctcctggatcccctcctgacctgctagaatctgttcctaagagtatttctgccttacctgtgaatccacattctatacctccaagggggccagcagatctgcctccaatgcctgttaccaaaccacttcagatggtacctcgaggttctcagttatatccagcacaacagacggatgtttattatcaggatcctcgaggagcagctccgccatttgaaccagcaccttatcagcagggtatgtattatactccaccaccacaatgtgtgtcccgctttgtccgacctccaccatctgctcctgaacctgctcctccctacttggatcattatccaccctacctccaagaacgtgttgtaaactctcagtatggcacacagccacagcagtacccacctatatacccatctcactatgatggccgtcgagtgtaccctgctccgtcttacacaagagaagagatattccgagaaagccctatacccattgagattccacctgcagcagtaccatcgtatgtaccagaatccagagaaagataccaacagatcgagagttactatccagtggctcctcatccaactcagatcagaccttcgtacctcagagaacctccttatagccggcttcctcctcctccccagcctcatcctagtctagatgaactacatcgccgacgaaaggaaataatggcccagctagaggaaagaaaggttatctctccacctccttttgcaccttcaccaaccttgcctcctacctttcatccggaagaatttttggatgaagacttgaaggtagctgggaaatacaaaggaaatgattatagccaatactctccctggtcatgtgacaccatcggctcctacattggaaccaaagatgcaaaacccaaagatgttgtggcagcagggagtgtggaaatgatgaatgtggagagtaaaggaatgagggaccagcgattagatcttcagagaagagcagcagaaaccagtgatgatgacctcatcccatttggagaccgaccaacagtgtctcggtttggtgccatctcacgaacttccaaaactatatatcagggtgctggtccaatgcaggctatggcacctcagggagctcctacaaaatctattaacatttcagattatagtccatatggaacccacggtggctggggagcttctccatattcacctcatcaaaacataccttctcagggacacttcagtgagagggagagaatatctatgtcagaagtggccagtcatggaaaaccccttccatctgctgagagagaacagctacgactagaattgcagcaattgaaccatcagattagccagcagacccagctacgtggactagaggctgttagtaacaggctggtgttgcagagggaggcaaacaccctggcaggccagtcacagcccccaccaccgccacctccaaaatggcctgggatgatctcaagtgagcagttgagcttggaactgcaccaggtggaaagggaaatcgggaagagaacacgggaactgagtatggaaaaccagtgttctctggacatgaaaagcaaactgaatacaagtaaacaagcagaaaatggacaaccagaaccacaaaacaaggttccggctgaggaccttacattgacattcagcagtgatgtaccaaatggatcagccttgacacaagagaatatcagcctcctatcaaacaagaccagctctctgaacctgtcagaggaccctgagggaggaggggataataatgactcccagagatcaggagttactcccagttctgctccttaa

SEQ ID NO: 654 - DNA, 32706 bp, Homo sapiens
  source 1..32706: mol_type = genomic DNA
ggagcccttctatgggccatatcttttcctgtcgtccccaaatagctcttattgttcacacagcccaggagagacgttttggagtagcgtgtccgggccttttgggctgtttcacagccttaggaggctgaactcccagaggggtgacgaggacaaagctgatgagatccagaacctggataatatggaagaagaaaaatggggtgggggacaagacgtgaaaaagaaacaagagttgggggacaacggctgagaaagccgaaagagtagacgtagtgtggggttcgatggaaacgaaagaaattcccccaatttactctcgccatctggccactggcccgctgagcccaaaggcgccggtgcgggagggcagaccggaccgagggaccggttcatctgctcagggcgtgtgagactttcggtcgcggcggagagcgtcgccggtctccctccgggcgttggtggccggtgactcagagctttgctcccgcgcccgcccctcccctccgcccgccccgcctcctgagggaggatcctcgccctcgtctccgccccagtctccggggcgggccggagcctgaggaagaggaaggggacgaggacaacgagcgactgggcggcggaggacgaggaggaggaagaggaggccgagcaacaagatggcccctgctgcaggagcagcctcagcagcagcaggtgggaggccggaggcggtgctggcggtggcggcggcagccgtggcccggcggcctgggacagaatcagagtcaacggtggcctcggcggcggcggcggctgccgcggcggtggcgacggccgcggggactcggagctgagaggagctgctgctcggaccagcgcggtgagcgagcggcgggcggcgacttggggagcggggctgccgcggccggggcctcagtcgggaacaataggcagctgtggtcgggaagggtttgtcctcgcccgccctctgctcctccgcggcagcggcagcccggccggccccaggctcctcagggcccccgccggctgttctggggcttgtcagtggccggcgtcctttaggcctcaggcctctgcatgccgcctgtagggcctgtcggggtaggtaggccgagaggaggacgaagggaggctcggacgagagggagggggcgaaagggctacctggctcctgtggtactcccagggcctgggccaggcggggaatgcgcacgggaactgctttttggacccctagtctgtgggggtgggggagggcgaaggcgtctgtaaacaggcgccgcctcggcctcccagcacctcagggctgcttcctcccccagcccctgaagcgctccccttctttggccaagtggatttcacggtgtctgtttccctgaagtccctggagatctagcctggtagtcttctccctgctggcgatgggaaaattgtgtgtgtgcaggtgtctttaaaaaaaaaaaacaaaaaacttaaatgcaacaaaaacatataaaatgtggttatcggtaaaggatggagtggtaagggatgcgcctctctaaacatctctaagtatcagttctataaacatcagttatgcccgcatcccaggtgagagtggattgaaacaagggctcttttggaacagtaataacacaactcttgacataccagaatagcctatgaaactggaaacaaacactggcaacgcggagacaaactgtaatgtttaaagaggacttttattccagctaggcgttttgaattactaacatgcagtataagaagcaacattaactagcataaagtggacctcaggaagcacttcgaaaggagacaggtggttcatctccggccatagagcttcttgtgccttgtctcgtgtttcagtaatttttcctgaaattgttcaagaccagtcttttctctgagtttgaaatttgatttcgtttttgttttgttttgcgacggagtcttgctctgtcacccaggctggattgcagtggcacaatctcggctcactacagcctccacctcccggattcaagcgattctcctgcctcaccatccggagtagctgggattacaggcgcccgccaccatgcccggctgatttttgtatttttagtagagacggggtttcaccatgttggccaggctggtctggaactcctgacctcaagtcatctgccctcctccgcctcccaaagtgcttggattacaggcgtgagccacctcgctcagccttaaacttaatttttcaaggcttctaccacattttcttacaagtgagggaaaaggtagatttatttctaaagtactttctacctaggtatgcagaaatttatattaaaatcgcttggatacatccaaggagattgcttttcacttgttaacattcaactgcaaggcctaagggttataggttgtgttcttttcagcactgacctgtgctgaaaagatgccagttaatatctttcacctcttctaagggtaaatttctaagtagaattggtccaagtctgttctaattaaaaacattataagcagcactagtctagttcttagttcttccacaacaattgacactgaatagattagcaattgaataaacataaaggttgaattttcttgtttaggatttgaagtatagtgaatgaatatcaatactgaccttcattttatgcttagcataaataatgttggagatgttttgattttttgaatgatggagaaataacaactttctatggctcctgatgttgtgacttttttgcagatatttcagaaaggacaccgtttttcaggtgctcaaatctgtgattttttttttttttctgtgctaattttgttaggtcagcacagattccaagtaaagtctgtgttataatgatacttaaatttatgtatggccctaaacctattagaacaattgtagtaatttataggttgtaagttttaagtggttcatgtgctgtgttatgaaaacaatctcaccgtgttatgtcaagggcagatttacctcatatttaatatcattttcctgaaaataaatatttttaagtggtaaggttttgtatttcagattggttattgacccagcaatttatgggcttagtctgggtccgtatttctgttcaataggaaaaaaatttagggaattgtttttatttattttgtgtcaaaacagttttaagttttgacacaaactcaactgtcccttcttcagtatcaatacttattacttaagttcacattttctcaggtaataaaaatttacttctaagaagttttggaaccagagcttaagaattagatttatattttcttggtaatattaaaagttaatatatgcttgatttatttgaagaaataaaaaagggtaatttgtacacaacgcctttcagaacatatttgttgaatgaataaaaatatttaagcttcctcattatgctgcagtattagttctgttgtcctcattttttcatatgaagaatgtgaagctaagagtagctatgtaaccagcaaaaagatcacataattaataggtaaaagagcttactcagactcagatcttgtgacacaaattagattctttgccactaccacatgtgtcacagttaaactttgaagcatcttctgtgttgacagattcctttttttgcctgtgaacttaccctattatcattatttgtatcctgtcagatatctacttgtaagaccaagaaagtatttgttcatgtgaatcacaaaagaaacacttaaatttttgtttttagcatatctgaatgctataaaatataaaaactcatactgtttacataggacagatttatcatactgctgtaattgttttcatggttaatttgttacataggcaattactaaattgtgcctttgaaatactttataaatttttttaaataattaaagatattcaatgatgttaaagttgggtcagctaatatttgaagttcttaatttataattttttttctttaagccatagataatttagaattctgcagtatttttcatctccagatcttagggcttgaaatggattctgatgggtctaatcagtccactcttgcatatatcttgaaaatggtcagcatccaacaaagtgaagaataaactgataaatgatccctgtttggtgaacacctcagatcaggatgttccttggcagggtattctgacctggtttagctttggccccgtctgtgctcagggttcaggtattctgcaggattgggttcagagggattaaaattctcagattggcctgtatcaaaacagtcacagattttggtcagccttttcccagaaccgtctccaagattttttcttttgtgtaattctggaatctaggctggatttggactagctttagaggttatgataaaagattaattttgtcaggcatttatacaaaggaggttttcttactacagagtttcttaaggtagattccttctatttttgaagtgtgacatttaccaatctgaagtaatgttgccctacatcccccagacacttaactttagcatatttatttctgtccatttttggtcaggattgtgcctgtttacttatataatattcttgtttactttttgtttattagatacttcttattagtttatattgttttcctgattgaggcttggggaaagaattttcctcaaatttaaagtcaccttacttatttgcagatgtatgtcagagcaatattcttttgacagttatcaagcattttagcaatgctgtatgtatatattatgaatgaatgacagagtcactcatggtctgtcacccaggctggagtgcagtggcattatcatagctcacttcagcctcaaactccttggtttaagtgttattcccgccttacctggctactttttttaatttttattatttttatagagatagcattttgctgtgttgcccagggtggtctcaaactcctgggagcaaggtgatcctcccacttctgcctcccaaagtgctgagattacaggcataacaatgttttaaactgacactggtataccttcactgattattactgtgcacatgtggtaataatttaacttataagtgcattttatctaaaaaatttccaagatctaaatagcatttgaacatggtagcagtttttttttttttttttttttttttttgagcaagaaaagagttctaaaggggtcagttttatctacagattaacataattttttttattgaggttaagtcacataacattaaccattttaaagtaaacagtttaggtggcactttatacattcacaatgttgttcaaccaccagctctaattccagaatgtgttcattaccccaaaaggaaacactgtacccattaagcagttactctgtattcccctcttccctaatccctagcaaacgccattctgctttctgtctctaatttgagccaacatcgaggaagagtactctgtacaattgaaattgcagaaaaaactttgggatgtgattgttaggaataaaaaaccacctaattctttgcatgcttctctaagtacagtagacatgctgccagggactctttatggaagaaaagttgagactcatagaagtttgcagttttgttttgatcaccccagagggttttgctcaaactcttagactcatttgtatttcttcattgggttataagaactaaaatttaatgttctatacaaatgtgaacaactaatacttggtctcctatctagaacttgtttgccttttaggttttcttaatgtatagaagaaactaggaatattcacaaaggatttatttgaagttacactgggaaacgatttttagaatttgaagctctttgatccctgtgaatctaactttatgactattttattcagctaatctttgagaatatttagagttttgatttgcgtggcactctgcttttaatcccttgttgaataagtgttagaaaccttgatcttggccctatacctgatcacctctaaaaacatgaacagtgttacaaaggcagttgtttagtaagcttttttggattgttttaattggctgactgagggagacaaaattagtttttttttttctttctagaataaagggtaataaacttggactttagagttactgctaagattgacatttccatttggggctttagaaatatattgttatcttaaattcaaaatggtactttatctaattgaattgaaatcttaaaatttatgagaaacaaaagtcactttatgttcttagtaaatatttctaatggggttataggagatctaagtacaaaaaaaatttaaaattttgttattaatctcccctccttaaggaaaattttattaatatacataattataatttagttataagaacaacttaagttgagtacagtggctcaagcctgtaatcctagcactttaggaggccaaggcaggaggatctcatgaagccaggagttccagaccagcctgggcaatagagtgaaaccccacctcaaaaaaaaaaaaaaaaaaaaggaaacttaaaaaatgataaggaaaaggattatgtcagaatatttagaactctgcagtaaaatttctggttttctgtaatttttttcaggaaaatgtcaactttttgtaaatacatgtttctgtgtttttatatatgcctcattaattttttagactaacatttagtggaaagctaatgtactcaattaatacatttaaattataaaaataactttttttttgagacggagtcttgctctgtcacccaggctggagtgcaatggcatgatctcggctcactacaacctctgcctcctgggttcaagcaattcttgtgtctcagcctcccaagtagctgggatcacagactcatgccaccatgcccggccaaattttgtattttcagtagagatgggatttcaccacgttagccaggctggtcttgaactcctgatctcaggtgatctacctgccacggccttccagagtgctgggattacagacatgagccactgcacccggccgaacttttatcttgaagtagatagtgtcaacaaatacaaaaataaaaataatgtctttaaatgaggtgatgtttagagctatatccatgaaaaatatgggataggctaggaggcggtgactcatacctataatcccaccactttgggaggccgaggtggcaggatcacttgaggccaagagttccagaccagcctggctaacatagtgagaccccatctgtattaaaacatatatatatatatataaaatatgaggccaggtgcagtggctcacgcctgtaatcccagaacttcgggaggctgaggcgggtaggtcacaaggtcaggagtcgaagaccagcctggccaagatggtgaaaccccatctctactaaaaatacaaaaaaattagccgggcatggtggcaggcacctgtaatcccagcaactcaggaggctgaggcagagaattgcttgaacccaggaggcggaggaggttgcagtgagctgaaatcatgccactgcactccagcctgggcgacagagcgagacttgtctcaaaaaaaaaaaaagtgtagtggaaaacttttgaatgaaacagaatcactaaattcttagctttattatagaacagtatttaatttgtccaggtctcagtttagattaagaagtaggccaaaaaaaaaaaaaaggcctataattatcagaaaaattaatgaactaaatcatctgcactaacatattggtttagaagttctcttgctttgtacataattcaaggaatttgattatctattttctcgtcccacagcagattaaaaggtgcaaattagatgttggagtagagccatataggtaggatggagggccagctgggtggcaggaaaaaagtcacattagcctgaggctgtttaaaatagggacagcagttacctatacaacacctcattagactctgagtatatcattaactgttatattgtgctatatataaagtattgctcctgatggaaaattcattgtgggaaaattatgtttgtaattttgggaatcataaacatatatacagtagagtggtgtatattagaatatagacctcgctaaaaaaaatagaacatacactttggagtccagtatatctaggttctcatcttctatgacttaagcattataattcctcatctctaaaaacagaaatggtaatacttttatctaaaggttgtttggaaatgtaaataataatatctttagtatagtacctgacacctttaatgaatgttattttcctccttaaattctgtttaacaaaaattagaaagatattcatccagaatatttttgatcaagttctactgtaaaatgttaatatagaagctacatataaaaccttatatagtttagggttaactgtatgtgtacttttgggagtggtagtcagaaatgaagtaattcttcatatgccattctcattttcttcccacatcagtctatttatatgggcctatgctgttcaatactggccactaactatatgtggctatgtaaatttgagttttttgaaagatttttttttttagaacagttttggatttacagaaaaattgctcaaaaaaatacacagttcccatttatactgtcccccacggtttcctctgttagtatcttgcattagtgtggtgtgttggttatcactgaggaaccagtgttgatacattattaactaaagtccatagttcacattaggattcaccctttgtgttggacagttctatgggttttgccaaatgcataacattatacatccactattctagaatcgtgcagaatggtttcattgacctaaaaatgtcccatgttccacttactcatctctgcctcatccctctgaacctctggctaccactgatctttttacagtcatagttttacctttccagaatgtcatgtggttggaatcatagtatatagtcctttcagactggcatcttcacttaacaatatgcatttaggtctcttcgtcagtatcttcttcttttgtttttgtttaaaatagagattggtcttgaactcctgggctcaggcagtgctcctgccttggcctcccaaaagtgctgggattataggcgtgagccactgtgcctggccctcttcatgtcttttcatggcttcacagtttatttattttactgcttaataatattccattgtggctgagcatggtggctcacgcctgtaatcccagcactttgggaggccaaggatcacgaggtcaggcgatcaagaccatactggccaacatggtgaaaccctgtctctactaaaaatacaaaaattagccacacgtggtggtgtgaacctatagtcccagctgcttgggaggctgaggcaggagaatcgcttgaacccaggcggcggaggttgcagtgagctgagatcgcgccactacactccagcctggcgacagagtgagaccgtgtctcaaaaaatatatatatataataataataatattccattgtatggatacatttaaattttatttaaaatttaattcctccgtctcaccagcacatttcaagggctcaatagccacatgtacctagtggctaccatattggaaagcactgatatatatgattcccccaaggttcaattctccacttccattcactctcatggagaactttcctgtttatatgatctcagtttttcctcaagcctacattttcaatgcattatctattttgttttgttgcttgtactatcagcaaccctcaattggttatttaaaatcctttactcccccaaagaaccattattttcaaatgttgtccattatagtatggtttcctaggttttccatcacagcatcatctctttttagtctgctcttcttttttttaattttctaaaattttattttgtttttgatccttctttttttaaagaatttatgttgcagcattctataatagtctgatcctttttgtccttaaactctggaatcatctttttgttttttattttcctctaaaccttttgaatatttagcagaggtgtgcagatctcagcactaataaatggcagagttggtattagaatctagatctccttattctagttctttcttttcttttcttttctttttttttttttgagacagagtctcactcttgtcgcccaggctggagtgcagtcgcgtgatcttggctcactgcaagctctgcctcctgggtccacgccattctcctgcctcagcctcccgagtagctgggactacaggcgcccgccaccacacccggctaatttttttgtagttttagtagagacagtgtttcatcatgttagccaggatggtctcgatctcctgacctcatgatccgcctgccccggcctcccaaagtgctgggattacaggtgtgagccactgtgcccggctctagttctttcttgggatcaccactatttggggctacttttagaagttattttgaagagggtattggagactgattatgtattatgtgatttaaaatatctttataagttaaatctatagaagctatagctatagatttcataaacatattatttataattctttaaacaattagaaactaaaatgaggaaatttatcctaatcagctaaatagctgattctctcgatgcaaaaatatttgtcccttcatatgttacctatttttttttttgagacagagtctcactctgttgcccaggctagagtgcagtagagggatcagggctcactgcagccttgacctcccaggctcaagtgatccactcacctcaggccacccctgccacctcatccccacctggtagctgggactacaggtgcgtgccagcacaccctgctaatttttgtattttttgtagagacggcgtcttgccgtgttgcccaggctggtctcgaacttctcggctcaagctatctatctgcctcagtctcccaaactgctgggattagtcatgagccaccgtgcctggctgtgacccattttagatgacaaaaactaattttcaatgctaatacgaattggttgttaaaggtgaatataattaaactgaacattattggcatcctaaatcctttattggccataatttacctttggattctattcaaactacactttgatctgtagaacccaaattggttactatatgaacttgcatcttcctaaactcatcatgttaaaaattttcacagcttgaaaaatggaggtcctcatatcagtctcttgattttcttttgaggtaagctgtccctctgtgcttagtccttgactaaaaataatcgtactgcttatggtcttgatttgacttttctgtatactggttacactggctcaaaagtccatttttgtggagactcttaaaaagtagtagtcttccacattcaagtactgtacttgaaaaaaaaaaacctggatttcagctttcatttagaaatgctttccctgtaattactacttttaaaacccatattttatatgtcaatttttacattaattaccccattgatagcagtttttgaatggttttagttaaaactgtcaatcttctttgcttgaatctagcctctcattaagtttatcaaaaactttaaaaagtaaatgtaagactcttcatatagtgttttttttttaattgagttatggattctttggatttattcattatctgagttagttttttcagaaatgtcttcttattttgtaggtctgtggttgatgaaaacctgttcatgagggcacaaaagactcttccagtttattctatcactataaaatagaatttgatggatttcgaagtaagaaaattcttagaatagaaaataggatggtaaatctttaaatgcatatgagtaattagaatatcataaggctagtacagataatattcttacaaaggcatccataaatagtgaagtggtagcacctattcccccatgattgacattcattaattaatccattgtacccagagttttaagatgaaaagctttaagtaccttcttcccctcatgagtaatcactcctcagtgaacatactatatgcttattgccatttgaatatccttttctgttcaagtgtatcatcctttttaaaaattgagttgtcatggaagaatttgatgtaggtaagtgactatcagctgtgaggaaggtagaggaaggcaagaactatcctgaggacagagatcagttaaaccgttgctgtgtggtcaggtgtgatggctcactgggaggccgaggcaggaggatcgcttgagtctaggagtttgcaaccagcctgggcaatattgtgagacctcgtctataaaaaaaattaaaaaaacagccaggcatgatggcgcatgcctgtagtccagctactggggagactgaggtgggaggattgcttgagcctgggaggtcgaggctgcagtgagctctgatcatgctactgcattctagcctgggtgacagagtgagaccttgtctcaaaaattaaaaaaagaaaaaaggttgctttgtgatctaggtgataagactgtattctgtatgagagcaaggactttatttcattcaggactatatcagtttctgggacactggcacgtagtagatgctcaataagtagtttttgaatgaatgactaagggcctcaatcaagaaagtggagatgaaaaggaaattatagatacaagaggtaatttattattatcattttacttatttttaatttttgtgggtacacagtaggtatgtatatttatggaagattttttttttaatggaagataaaagtgaggacatcaggcatgattaccagaaatgtgcattgtctagtggtatcactaaagaaagattacagaaggaatcaccagctcaaaaataagaataaatttagttgccaagtgaccatcatattacctaacatctctgttacagtgttcttggccctaaaattaataatgagaccaaataggctcattgcgaggacgaagtgtttgcatgtgatccgcataaaagacttcctggcacatagagtgtactcaaaaatagttaaagatagaaacaaaaatctgtttgtttttgagactgagtcttgctctgtggcccaggctatagtgcagtggcacgatctcggctcactgcaacctctgcctcccgggttcaagtgattctcgtgcctcagccttccaagtagctgagactacagacgcgtgccaccatacccagctaattttttgtgtttttggtagtgacgggttcaccatgttggccgggctggtcttgaactcctaacctcaagtgatctgcccaccttggcctcccaaaatgccgggattacagacatgagccaccatgcctggcccacttttaaggagctaatatttcagtatcgatgggtatacactgtaacaaaataaatatgaaacacagatgttggatgagaagtattattgagaaaaattaatcaggaaagagatgggaagcatgcagtttaacatgtggttggatagcagagggctggggagggattgagattggggcatctatttgaaataaggtgatcagggaaggccttctctgaaggaattcatatattaatgcctatacagaagtggggagaaggttcagggttggaggaagagtaggacaaactatgttcttaaccagggtccctgtttttaccaagcaataaatagacttatctgtttattgtgcaatccacagtggttagacttatctcaacctttcatttcctcttccctataacatgcacactatacaaacctaagcgtgaatttaatccctgaaagatcatcattacatattttggaggaagtgtcatatttgattctgatacagcagcagccagtcagtaggttctctaacattagcagctacttgggaatcagcaaaacatctcttttttttttttttttttttttcagacaaagtctcactctgttgcctaggctggagtgcagtggtacgatcttggctcactgcaacctccgcctcctgggtttgagtgattctcctgcctcagcctcccaagtagctgggattaccggtgcccgccaccacgcctggctaatttttgtgtatttagtagagatggcgtttcgccatgttggtcaggctggtctcaaactcctgacctcaggtgatctgctggccttggcctcccagagtgctgggattacaggtgtgagtcaccacacctggccagaacatccccttttacaatttaatttctgtttcaaaccgctttatataaagataaaataataatacagtataaacaagatacattgtggctataggattctgtgtttggagttcatgtagcaattttttcgttcttttaaacccttcaaaatggaattttgcttgcaatagtagttgagaaataattctaaaatggaaaatgaatcagctcctcctcttcctccttctccctcctcctcccttcccctcttctgcttcttcctctgctgctgcttctgcttccttctttcttcttttctaagcactgtttttcaagtatctgcaattaaaagtctctgtgacattgttttctggaaatagtttgaattctaggaggcatatttcaaaacaaaacaaagtaatgaaatgtccttaagacctaagagattatggggaaatacattttaaaaatattgatgttattgctattattaaatatactaggtttttaatgcaaataaaatttctaggtcagaatatataattagatatgtacctgttgtgaatacatctacatgtttctagaattagtcagaacatgatggcagccaccaaatgccacaaggaagtctaaagcacaggatcatagggaaaaagaaatagaagcaagtaataggagactattagtgtgtgacacatatgctgtgtgatgcatacactgttttcttgagtaaagaggagatttttgtctactttttttattgacactcatttttgttccttccagttcaacatgagaaatctgctgcattcaaaatctacaagtcatcattgctccaaaaataagttcacaaagggtagcttcctaactgtgatcattttaactggagtgctttgtaacagtttaaaatgtagtaaatgctgggaaaaaaaatctaacaaaaataatgttgtgtgggccggacgcggtggctcacacctgacatcctactgatctgggaggctgaggtaggaggatcacttgaggtcaggagtttaagaccagcctgggcaatatagcccatgtctacaaaaattgtaaaaagttgcccggcatggtggcccatgctcatagtcccagctcctcaggaggctgaggtgggagggtcgtttgaacccaggggtttgaggctgcagtgagccatgatcatgccactgcactccagcctcggtgataaagcaagaccctgactcaaataacaacaacaacaaaacattgcatgaaagaagccaagtacaaaagaatacatactgatgattccgttatatagattttttttttttttgagatggagtctcgctctgtcgcccaggctggagtgcagtggagtgatctcggctcactgcaagctccgcctcccgggttcacgccattctcctgcctcagcctcccgagtagctgggactacaggcgcccgccaccacgcccggctaatttttttgtatttttagtagagatggtgtttccccgtgttagccaggatggtctcaatttcctgacctcgtgatctgcctgccttggcctcccaaagtgctgggattacaggcgtgagccactgcgcctggcctgttatatagaattttaaaccgggcaaaactaacctattgtgttaggagttgggatagtagtgatatttggggaagaataaaggagtaatcattgggagggatagtgagggggggccttttgagatgctgataatgtatgtcttaagtatgcaggtatgctcactttgtgataattcgttgaactgaacactcttgatctgtatgtatgttatacttcatcttaaaatatcagtaaggcgtcttaagatatatgattcattttattttagttcccttctcatttctcagtgaaatattttaataaaatcttcaagacagagttatccttttggttctgttcaaaaggaatacagtagttgctgctacaacctaattttttctttttaataaacaagtaggtttaaacagttccagagttcctacttaaaaccagtcatgctcagattaaacccaaaacaggcatcatttaatttatatctttaattatggctgactaatgattattaaaaagtataataaaaagttacaagtgctcaaagttggaaggcatggtgttatagtggaaaaaatacaggttttggagtcagatagatgtgggttcaaattatgactaaatcactaagttagctgagtaactgagttttctttccttccttcatcagtaaagtagaggtaataatatctatgtcagaaggttgttggaaaggttaaatgagatagtgattggcagtcaaacgcccttcttttcctcctacagtttcaagatagagaaaatatttggggagtatatgaagatagttgtaggtaggtaaaaaagtataacttgctgaagatgaccaaccttagctaatgatggtaaagaacagtctttatttatttatttacttatttatttattttgagatggagtttcgctcttgttcccaggctggagtgcagtggcgtgatctaaggtcactgcaacctccacctcctaggttcaagcaattctcctgcctcagcctcccaagtagcagggattacaggcacccactaccatgtctggctaacttactgtatttttagtagagacggggttttgtcatgttggccaggttggtcttgaactcctgacctcaggtgatccacctgccttggccttccaaagtgctgggattacaggcatgagccaccgcgcccggccaggaatggtcttcagattgtcaccagtaaggactaacaacatctaacttggaaacacatgaaacattatcagtattaagagttagtaatgctactttggctcatcaacatagaggactgttgcatggatcacagcttaagtatgttgagctggattatgatacattttagataggtttaaattaagcacaaatggtaaatatttttaagtcaagaggggttcattgcccatgttgtgctttgaaaatgtatccttttgcttttctgttactgataatttatgatgcaggattgaggagccaaatttaggcatgttgtgtttgtgaaggtccgtcagtatctttgtgatttttagagcctaaaaaaagataaatatgttctgtcaaaaaggttatgattcaattgagacaatctttcaaattcctacatcaatattatatgttttctcaaaagactataatgaaatttatatatgtaaaactatcttaattatataatcaccagataatctattattaaataacaaaccactctaaaatttagctgcttaaaacaaccgttttattcgcttacaattctgtgagtcagcaatttggactgagtttagtttggtagttctgctagtctcccctgaggccacttgtgtagctacaatcatctgacagctcaaattaggactggttttagggatctgagctattataaaacagctcttctttgtttcatgtactcttgtcctcagacaagctagttcaagcttcctgcaaagtctcttgagacctaggctctgaaactctcccagcatcacttctgttgcatgcaactgttgaaagtaagtcagggccacccaggttgaaggatgggggaaataaaccccatgtcactattttctctatggtttttaatacttaggaagctgtcctatatatgttagcaaatccatcaagctggagtattcacgtattctctaatagaaagtcaactgactcctgtccccctgcccacccccctctaaaaaaaagcttttgggctagtgggaaactgttggggaagaaacctagggcctttgcatgttactctgaatggtaagaccctatcttccctggcagcttcccattagcccgatagacttttttcttttctctcttttgtgatcttggctcactgcaacttccgcctcctgggttcaagcaattctcctgcctcagcctccctagtagctgggattacaggcacctgccactatgcccagctaatttttttttttttttttgtatttttagtagagatggggttccaccatgttggtcaggctggtctcgaacccctgacctcaggtgatccacctgccttggcctcctggagtgcctggattataggcatgagccactgcccctggccctgccaagtgacattctcttagagaacacataaatactccagcttgattgatttgctaacctatataggataacatacgtatttgtgtattaaaaccatagagaaaatagggccaggcacagtggctcacgcctgtaacttcaacaattttggaggctgagatgggagaacacttgagcccaggagtttgagactagcctgggcaacattgtgagatctcatttctactaaaaatttttaaaaaactaaccaggtgtgttggtgcacacctatagtcctggctacttgggaggctgaggtaagaggatcacttaagcccagaagggtgagacttgaggctgtagtgagcagtgattgtgctgctgactccagtctggatgacagagcaagaccctgtctcaaaaaataataaaaataaaaataaataatatataattaataatatataattatatatgatatataataatatatcatatatataaaataattttaaaagaaagattaaaaaaacttcagtgactgagtgacataccagttactgtgataaaagcatggggaattgccgggcgcagtggcttatgcctgtaatctcagcactttgggaggccgaggtgggcggatcacaaggtcaggagatcaagaccatcctggctaacacggtgaaaccccgtctctactaaaaatacaaaaaattagtagggcgtggtggcgggcgcctgtagacccagctacttgggaggcagaggcaggagaatggcgtgaaacccgcgaggtggagcttgcagtgagctgagattgtgccactacactccagcctaggggacacagagagactccgtctcaaaaaaaaaaaaaaaattctctgatttttcaggaacttacagtctagttattatagcctagctttgctgtattagggatgtttgttaccagggataccagttaagaaattgtcacagtgatccaggtcagagatgttggtattgggaatggataagaaggttttaagaaacattaaagaaataatatgtacatggcgattgatgagttgatgggtaggggtgtgagaaaagagagtagtcaaggatgattccccgtacgtgtgtgtgtgtgtgtgtgtgtgtgtgtgtgtgtgataggagtcttgctcttgttgcccaggctggagtgcagtggctcaatctcggctcactgcaacttccacctcctgggttcaaggaattctcctgcctcagcttcctgagtagctgggattacaagcgcccaccaccatgtctggctaatttttgcatttttagtagagacggggtttcaccacgttggccaggctggtctcgaactcctgacctcaggtaatcctccacttcagcctcccaaagtgttgggattacaggcataagccaccacgcctggcagttccccatgcttttatcacagtaattggtatgtcactcagtcactgacaaagagaacaaaaggtttggtggggaggagatgaacatggatgacttagtagtcaactggttatatggccctggcactcagaagagaagtctgaacttgagagagagatttggaagtcagcaggatctagttggtagttgaaaacataaaaacagatgaaattactcagggaaactttctagggaagagaactggggaaggaattctaagaaccaacactattccaaggatgaatagagaagaagaagccctcaatagatatgggcaaggagtggcttgccaatcattggacagtatgttgtatagaacctagaaaagggcagcttttgtaggagtaactttaatattattaaatgctatatagaaagaagtaaaataagaattgagatatgactcttgaatttcataaggttcttaatgtgcttgttaagaattattccacaatagtggtggatggaaacagggacaaggattgaatgacttttttagatgagacaagttggagacaaatttctttcagctcctgaacaaagatttaagcatgccagtggggaaagaactaataatgaaggacaagttgaagaaacagaatattagtgccaccctctaaaatgtcttaatttcatcatattcctgaggattctataggatagtatttaacaacctgaaacataaatttatcaggcacaggttagattttctttccattgtgattatttgtccctgcatcccacatgattatttgccagtcagatttgtgtgtctcaaaataactggacaagaggagtaaacttcctttataaaaatgaaccattattgcagcaagaggactgatttcaaaagatgacctggaaaactgtttagtcttgttaaaatatttggcctcatcttcaaaatgtatacatgaatctttcattttgggattgaaatatctttctgatttagaaaagaagcttgattaagaaggagatgtcaacttttacctcccccgcccccaacaaaaaaacagtttcagaaatttatgattaatttaaaagcagttaagataataaagcaaacaattttgtaaaattttttgagggtaatgagtaaactggaatgctcaatgtatactaaaaatactcctgatcttagtaaccagtttttattacatccttagtgtttgtactaacactaaattggtgattataaatttatttacttgatagtatagtatatgtaatattcaacagagtgttaatgcaaaaactgaaaaaattaaaacattttgcttttttgcttaatcggtaaattttcctttctactacctttaaagatggtgcttttggctgggcgtggtggctcatgcctatataatccctgcactttgggaggctgaggctgatcacttgagaccaggagtttgagacctggcctacgtggtgaaaccccatctctactaaaaatgcaaaaattagccaggcatggtgttgcacatctgtaatcccagctactctgcatgagaatggcttgaacctaggaggtggaggttgcagtgagccaaaatcgtgccactgtactccagcctgggcaacagaatgagaatctgtgtcaaaaacacaaaaacaaaaaaagatgatgcctttgagtctggtcacatcattctgccacctctttgataattaatgagggctaatgccctctttagtgtagcacatttgtatataatgcataacttgaacctggagattcaaactacatacgtaaagttaaagactgtcttactttctcaggcactctgtttcaaactcaggtcaggcggcttctccatgaatgattttgtcctttcttactacttctcctcaatctggtattaggttggagatagaaatttttctttttgcctctgaacgctgaaaaagtaagcaacctgaattaaccccttgaactttcctccacctttctttatcaagttctatttttcaagctattttttccctctaactcagaagcccttctctttatgcctgtcccaagtatttatccatttgtactaacataatcatattaaattatttacatccaggattttgtatatatagggttacaattcagtccatacattttgggaagatgtatttttacaatcaaaactgggtctttgttcacaagatattattgctggaaaaaccttgagcctcaaattttagactctatttccactgtaaattagttgatgctctgctgaggattaaaaaattaagtgttataataggccttcattagttttcttctttgtgtttttatctcctgcttctagcttcatttttcaaggcagtgaaacattttctcttctctgatgtggccctacatgctggttgctatggaaatgttccagagaaatgaaaaattaagttaaggtcaagaataatgagttaaaatctcatctcatcgggcatagtgggaagagagccaagattttcttcttacagacagtgtggttttgtttgataaaaacatttttcacaggccaacttatatttcagatatgtaagacctggtgttaatcccagctcaacagtttattgatttggggccgttacttaatgccgccaaacctcaagttatcttctgtaaaatgggcatagtaatgcctcagaggagtgcctggctcagagtagatagttgaattttaatttccatttttctctctctaaatcaggaacatataaaatgaacctataataaaggagatggtaataaatgtgtcatatgtttaaatgaaatcttcacagcaatgtaatttagctatttaatagggctattgctgtgctcatagaacagattcgaatagtttctatgtttctacattattacttaacatttttgaaaactaagactattaaaaagcccttaatgactattttaacagctttattgaagtataatttacataccatagaattcacttattttaaatacacaaatgatttttagtaaatttacagagttgtgcaaccattactaccatacaattttaaggcatttctgtcactcccaagagctcccttgccataattactataaacttttattcgtgtggtggcacaaattatagagtttcaaagtaccagcctgggagtttggctgtcctgagtttgagtcttagtcgtgccactttctagctttgtgacttgggtactttggtttccttatctttaaaatgggcataataactacattacagtgttactgtgaacattaattagatactgtatatagagcactgaaagtataatatcctagtttttgcttcacaaatgttggttattggtggtagtccacattgtggatatttaaataagagaaacatctgaaaacacctagcacagtgactgacacatgattgattttcagaaaacaaagctgttctacgtctttccagatgcatcatgtcatcacaattttgtctgtagttgctcattgacaatgttttaatcatacttaaacatcgatgctcacaatatgtagttatttgttattttgcagaggcatacatttgaatttaacagctaagggagctgtaagacttggagtttggtatctacaaactagttacttagctggtggacccaagcaagtagccttgttgtttataattcatatctttctttctctctctctcttttttttttttttggtggagttttgctctcattgcccaggctggagtgcaatggcacgatctcggctcaccgcaacctctgcctcccaggttcaagtgattctcctgccttggcctcgcgagtagctgggattacaggcatgtgcctgctaatttttgtatttttagtagagacagggtttctctatgttggtcaagctggtctcaaactcctgacctcaggtgatctgccaacctcagcctcccaaagtcctgggattacaggtgtgagccaccacgcccaacagtttttttttttagagatggggtttctctgtgttgcccaggctgcagtgcagtggtgtggtcatagctcactgaaaccttgaactcctgggatcaagcatacctcccacctcagcctcctgagtagctgggactacaagtacgtgccaccacactctgctcattttttattttgcttatagagacaaggtcttgcctttttggccaggttgatctcaaactcctggtctcaagtgatcctcccacctcagccacccaaaagtgctgagattgcaggcgtgaaccacagcacctagctgaaataatttttttattttgataataagatctttatttctttgttaagaaaaaaaacctgagtaaagtcaaatggtaatattagtgataaaagtttagagatttaagaaagtggtggttcttaaccagaatttagacattgggataaattaatagtgaaatgtcagatgtgatattctgtactgtagcttcagtcaatgccatgaacaaggcatataactgaataaagcagtcttttcagtgttttctgtgagcactctttagtggtgtaaaaatgtgtatatataattggggaaattatatggtatttttgaacttgggtcttaggtcagacccttgaactgattgctatttaattatcatgtatattctgtattagcaattatcaacagtaaaatctcgtcatttttgtaggagaggtgtccttatttaaactggtggggaaactaatcattgctttcatacttgagcagcagtgtcactcttttgaatctttttggaaataaagagggctcatcatttgtcttctgtttcaattggaaggttccaatagaaatactcctaatgaactagatttggcctgacccccaacagtttatctgcaggccttgaatgcatgtgctttgattagtagaattatttacagctgtttttgttttgtggcccttttttagtttgctgacatacctttttctgaggaagttcaaaaaatctggatgttggtatattaataattttatttcatatgtttacttttgactgaaagaatgcttattgtatttagtaaatcatgtcttttgtggtttagatacatgttgtggttgaagagtatataaactgtctttgagaagcttggagaatgtttggaagaatgcgtttagagaaagatacttaaagaatgaggaaatggaaattcttcttagatctatgatctacaattaactgacactttgagtctcaaaaaaatctttgccttgtgattttttaagtcctgaaatagggtcatctaagagtgactttctgttattaatcatcaaatttcccagaaaaagtcaaggtttaatattattttccccttggtctctcaaacctgtatttatggtcaaaataatgcttttatttttaatgaagaactgattgctgatttttgtatttttattctatcaagttgtttatagttgtgtcaaagaactattttactagaaaatttaagagattaacaactacataccttactttacaaagttaatagagatggaggtgataaacaaaattaataaaggaatgctaattctttgaagggataagttacaaactattttaaggttcttaaattttgaaaagaactaataagttttgatatttggctatctaaatgtgtaaaagaagattaataatattaggacaaatgttttgaatcgttttagagtgattatcttaagaagcttaaattgtactctaagtgtactctagctttgtgttactctttcaatttatttgtacttatataagtaattcatgattacatacttttgtaagttgcccaactgtgtaactgccattaagtttttttgtcttgttttgttttagacaggtctcgctccgttgcccaggctggagtgcagtggagcaaacatgactcactacagctccgacctcctgggctcaggcaatcctcttgcctcagcctcccatatagctgggactacaggtgcccatgtccagctaaattttttatatttctgtagagacggggtctcacttgattgctcaggctggtctcaaactcctgggctcaagagatccacctgtctccacctcccagagtgctggggttacaggcgtgaaccaccatgcctggcagtgccgttaagttttgttacccaaaaaaaaaacagaattcctttgcctttcaagtaaaaaatgactccacaagaacacagattttgatcaatggaagttttattacttgtcacaagtaaggagagcactgggagtattctccaaagcagtgggtctctgagggaaagtgagaggagggttttatggggcgatggagagggaagagagggtatgtcactgcatgtagaggaggggtcccagtggtgcacatatagtgagtctttatgcccggacgtaggtcacatgctatggtagtgaagctatagcttctcccaggatggagactttagcatggtaacgaggaaagttcactcaggtttatctgtgagtggccagggtctgtgaggaactggttccagctgtctaggtgactgcattctacacagggtttaggcaaaaataggctgcaaggcaggaggctataaaacaggctgattgttcaagttgattaattcctatagtccatgaagaccttgctgtctgcttacagcttgttgagtgtcttttcagacctttttcttccattcatttacatatattaatacgtagactaatatgtaagggttcttttccctcagcacaaatgatgtcatatatattggtcttcaaggcttttttttttacttaatgtattttgagtctctttccatacattttcatagcactggtatgtctctgtttatctagagtgcaacggcgtgatttcggctcactgcaacctccccctcccgggttcaagcagtccaactgcctcagcctcccgagtagctgggattacaggcgcccatcaccacacctggctaatttttgtaattttagtagagatagggtttcaccatgttggccaggctggtctcaaactcctgacctcaggtgatttgcccaactcgacctcccaaagtgctgggattacaggcgtgagccgccacacccagcccaattttttcaattgcatcgatttctggtcttttaaatcttattataaataccttggtaaagtttattatctttctgtaatatggacaatcactgtaatcaatctgttttccatatttttacatatcaggttttcttaaagtaagcatcatgctggtgtagcagcatatgagtgctttagggcccaagagtgagaaaagacatatagttgttactcttcctagttgagccttgaaggagatcatagtggactgtgtgtgattggtgagaataatatcacaggagaacattgaaaacaataaagtgagtcacctcctgccccttcagtggctttacactactcttcatatagtaaccaaataccatcatataagttagaagatcctgtgttctttggtccttgctaattctttttttctttttctttttttttttttttgagatggagtcttgctctgtcacccaggctggaatgcagtggcacaatcttggctcacttcaagttctgcctcccaggttcacaccattctcctgcctcagcctcccaagtagctgagattacatgcattgtgcccccatgcctggctaattttgtgtttttagtagagacggggtttctccatgttggtcaggctggtctcaaactcctgacctcaggtgatccacctgtctcgtcctcccaaagtgctgggattacaggtgtgggccaccatgcctggcctcatctctactatattctatctagtctcagaatctatggttatgctgtttctttacctagaatctataccacacatattaaacattattcttcccttaactttcgttcagcagtcatctttaaaatcttaccataaatatcacttacctgtacatcagctccaccctaatttggtcaggttgcctctgttatatatgcttgtatctccctgtactttacctacatatcacttaccataacttgcaattatatatttagttatgtgattgctgtttatatgtttagtgaaagaaacagtgcaagctccatgtggacttagaatgacttatcttttttttatcgttagtactgaacacatagtaaagaccaataaaacatttttttgtcatttaactaaattaaatttttcctgggaatggaataaggtttcttttttcttttttttttttttttttgagatggggtcttgctctgtcacccaggctggagtgcagtcacatgttcgtagctcactgcagcctcaaactcctgggctcaagcgatcctcctaccttagcccttagcttcctgggttgctgggaccacaggtgcatgccaccacgcctggctaatttttgtagagacagggtctccctatgttacctaggctggtctcaaactcctgggctcaagcagtcttcccatctcagcctctgaaagtgctggaattataggcatgagccatcacacccagcctgaaaaatttgtatgagtctgtcaagattgtggtataaatacagaggaaacatatgtttatataaattgtttctacttttaaaatattcttatgttgtcaaaagttttgtttgtttgtttgttttgagatggagtctcactgtgtcgcccaggcaggagtacagtggcggatctcggctcaccgcaacctccacctcctgggttcaagcaattctccttactcagcttcccgagttcctgggattacagccatgcaccaccacacctggctaattttttatatttttggtagagacggggtttcaccatgttggccagtctggtcttgaactcccaacctcaagtgacccacccgcctcagcctcccaaagcgctgggattacaaacctgagacaccgcgcctggctgtcaaaagttatttatgtcttgttcagtaattcttccctccctctacccccttccccaacaaagcttttttttttttttttttttttctgagatggagtttcactcttgttccccagagtggagtgcaatggcgcgatcttggctcaccacaacctccgcctcccgggtttaagcgattctcccgcctcagcctcctgagtagctggggttacaggcgcctgccaccacgcctggctaatttttgtatttttagtggacatggggtttcaccatgttggccaggctggtctcgaactcctgacctcaaggaatctgcctgccttggcctcccaaattgctgggattacaggcgtgagccaccatacccagccaagattattttttagatatatttattttttaaaaattagagatttagctgggcatggtggctcacacctgtaatcccagcactttgggatgccaaggcgggaggatcatctgaggtcaggagttcaagaccagcctgaccaacatggagaaatcccgtctctactaaaaatacaaaattagtcaggtgtggtggtgcatgcctgtaatctcagctacttgggaagctgaggcaggacaatcgcttgaacccaggagacggaggttgcaccattgcactccagcctgggcaacaggagcgaaattccgtctcaaaaaaaaaaaaaagacttagataaacttaagagactagggtcctggatggaactttattattaacttcaagtttcctcttaggcaggggactacttcccatctctaaaatgagggaatggaaatagatgttctatcatggctctaattctgtaaaagtgtaaaaagatggattacagtgatacaaatgtggtataaaaagttgtggaataagactggacttgtggttctttttcaacagtttaattgaaaagaaagacactcaatttttttcctttttctttattttcaggttatatttcacactatgtgctgactgtatctacagaagatatttaaaaaaaaaaaagataaactttttttcaaagattttgattccagtggaatctttgctttagatttgtgtgtgtgtttgtgttcgtgaattgtaactccagaagcaatgcctgtacaagctccacaatggacggatttcctctcctgcccaatttgcactcagactttcgacgaaacaattcgaaagcccatcagtttgggttgtggccatactgtctgcaagatgtgcctgaataaactccaccgcaaggcttgcccatttgaccagaccactatcaatacagacattgagctcctccctgtgaactcagcattgctgcagctcgtgggtgctcaggtaggatgggtgacttaatacttttaaatttctccctctctctctctctctctctgtgtgtgtgtgtgtgtgtgtgtgtgtgtgttgtgcgtgtttttctcctgagagaaacctgttgaattaaaattgggtaacattgccttctatttaaataggtataattctgtttggtactgtaaatcctttatttcagcatgttagatttattgtggtagtccagtgctttttagtcatagtacagtaacatccatttaatcttgtcagatattcaataaacctagctatgcagatcgctagagaaacctaaggccgggtgtggtggctcatgcctgtaatcccagcactttgggagggccaaggcgggtggatcatttgaggtcaggtgtttgagaccggcctggccaacatggtgaaatcctgtctctactacaaatacaaaaaaatgagctgggtgtggtggtgtgtgcctgtaatcccagctacttgggaggctgagacacgagaattgcttgaacctaggaggcagaggttgcagtgagccgagatcgtgctgcactccagcctgggtgacagagtgagaccctgtctcaaaaaaagaaaagaaacctaagaggtaagtcataaggaccttttttaacattgagaaaactattgttcataaaaccactgcactttactcagtagagaaggtgcagctgcttcaggcagttttactcagtagacattaactgaaatgaaagatgagaaaggtgacaaaaactatagcacaacatttgggaaccattagaacacacttaatgctttataaacctaaaaatggttgggatggtaaattttgtgttatgtatatattatcacaataaaaaaaataaaattttcccaaattttcctttcatctaaaaggaaaaagaaaaaataaattagactttaaaatatataatcaccaatttctcctaggaatgtaagtttgacttaacatctgcaaatcaattaatgtaattcactatatcagtaaaagttgcaaaattgcacacatatgatcatctcaatagacacagaaaaagcatttggcaaaatccaataccttttcataataaaagcactgaaacaactaggagaaaaacttcttcaacccaaaggacatggatgaaaaacccacagctaacatactgaatggtgaaagactagatgctttttctgtaagatcaggaacaagtcaaggatctccactcttaactatttctgttcaacatcatacaggaccttctagctagggcaattaggcaagtaaatgaaaccggtgacattcagataagaagtaaaaaataaaaacaatctcattcacagatgacatggtcttatatatagaaaatgttaaggaatctgcaaaggaaaagctattagaaacaaaaaactaggcagagttgcaggatataagatgagtatataagtatcagttgtctgaaaaagcaaaagtctttctaaggtgtaaaaatgtgtttacagtgtttcataatttctttctttctttttttcttgctctgtcacccaggctggagtacagtggtgtgatcttggctcactgcaatctctgcctctcaagttcaagtgattctcatgccttagcctcccaagtagctgggattacaggtgtgcactaccatacccagctaatttttgtatttttagtcgagacagggtttcgccatgttggctatgctggtctcaagctcctgacctcaagtgatccacctgtctcgacctcccagagtactgggaatacaggcatgagccaccgtacccagctagtgttgcatactttcatccacagtatgttaataacagttttcttaggccaggcacagtggttcacgcctgtaatcccagcactttgggaggccgaggcgggtggatcacgaggtcaggagatcaagaccatcccggctaacacagtgaaaccctgtctctactaaaaatacaaaaagttagctgggcgtggttgcaggcgcctgtagtcccagctacttgggaggccgaggcaggagtcccagctacttgggaggccgaggcaggagaatggtgtgaacccgggaggcggagcttgcagtgagccgagatcgcaccactgcactccagcctgggcaacagagtgacactctgtctcaaaaaaaaaaaataaataataataataatacttttcttacacacgtaagaaagactgtctggtacataggcccttaataaagactgttaaataagtaatatatatgttgtatttctatacgctggcaatggacaatctgaaaatagatcaatttcatctacaagagcataaaaaaaattaagaatatatttaacaaaagaaatgtaaaattagaccgggtgcagtggctcatgcctataatcccaatagtttgggaggccgaggctagcagatctcttgaggccaggagttccaagaccagcctggccaacatggtgaaaccccgtctctaccaaaaaa

SEQ ID NO: 655 - protein, 211 aa, Homo sapiens
MVAHNQVAADNAVSTAAEPRRRPEPSSSSSSSPAAPARPRPCPAVPAPAPGDTHFRTFRSHADYRRITRASALLDACGFYWGPLSVHGAHERLRAEPVGTFLVRDSRQRNCFFALSVKMASGPTSIRVHFQAGRFHLDGSRESFDCLFELLEHYVAAPRRMLGAPLRQRRVRPLQELCRQRIVATVGRENLARIPLNPVLRDYLSSFPFQI

SEQ ID NO: 656 - DNA, 636 bp, Homo sapiens
  source 1..636: mol_type = genomic DNA
atggtagcacacaaccaggtggcagccgacaatgcagtctccacagcagcagagccccgacggcggccagaaccttcctcctcttcctcctcctcgcccgcggcccccgcgcgcccgcggccgtgccccgcggtcccggccccggcccccggcgacacgcacttccgcacattccgttcgcacgccgattaccggcgcatcacgcgcgccagcgcgctcctggacgcctgcggattctactgggggcccctgagcgtgcacggggcgcacgagcggctgcgcgccgagcccgtgggcaccttcctggtgcgcgacagccgccagcggaactgctttttcgcccttagcgtgaagatggcctcgggacccacgagcatccgcgtgcactttcaggccggccgctttcacctggatggcagccgcgagagcttcgactgcctcttcgagctgctggagcactacgtggcggcgccgcgccgcatgctgggggccccgctgcgccagcgccgcgtgcggccgctgcaggagctgtgccgccagcgcatcgtggccaccgtgggccgcgagaacctggctcgcatccccctcaaccccgtcctccgcgactacctgagctccttccccttccagatttga

SEQ ID NO: 657 - DNA, 2988 bp, Homo sapiens
  source 1..2988: mol_type = genomic DNA
cgcttcccgggaagcccgagccaagaccagagaccgcggccggccggggcttcgggacagcagggcgggcgactgagggcgtcgacggcgggtggagcaggggctaggagggggtctacgggtggggtcaggctcagggttggggacaccttctgtggcctcctagggggatctggctgcaggggaggagaggacagggctctgcccccggcgggtgtggagacagctggggcggaggagggtgtgtcagggcgcgtcccaagagggcctggcggcagaaagtggaacccgaggtagcggggcaaaatcggggtcgccaagtccgaaggaggggtccgagaagtggccggaaggcgcagggtcggggccagagcccctcgagaggcgggtgctggggcaggtgcgaacaggcgggcagagggccccgcgggagggtccagaagagagggaaacagggccgaagcggtcctcgccggacgccaccgcggaaagagaaaccaaaagtggagctgggggcggggccggcagggggcggggcctcccgccgtcgccagccccgcctccgagccggtttaaaagactggcgcaggggcgggcgccgaacagagcgagctgcggccgtggcagctgcacggctcctggccccggagcatgcgcgagagccgccccggagcgccccggagccccccgccgtcccgcccgcggcgtcccgcgccccgccgccaggtgagccgggccctgggcgaggaggcgggagggaggagggaggggagtccagggcagccaggagtcgggcgagcctcgggggctgcagaatggggtcgcggccgcgatgcccctgaccctcgccggccccacccaggccgccccccgcgcgcggggctcccgcagcacagcctttctccggccctagcccaaatcgcccagaccaggcgcggatcccagcctggccagcaggcggcgggcgcggggcggcgagccggggccggacggctggagccagaaccggctgctctccacgcccccctctcggtgctgcccggaggccggactccgcctccaccgagcccccacccgccgggaagagctccgcggagtacagagcccattttctagctgtgtccactgaggctgaacggatccgcgcggacttggtgctccgtgctcgccccctagggccgggtccgccgggagcgccgccctccggagttgtccggccggcgcacacctgcccggccccgcagcgccccagctcacctctttgtctctcccgcagcgcacccccggacgctatggcccacccctccggctggccccttctgtaggatggtagcacacaaccaggtggcagccgacaatgcagtctccacagcagcagagccccgacggcggccagaaccttcctcctcttcctcctcctcgcccgcggcccccgcgcgcccgcggccgtgccccgcggtcccggccccggcccccggcgacacgcacttccgcacattccgttcgcacgccgattaccggcgcatcacgcgcgccagcgcgctcctggacgcctgcggattctactgggggcccctgagcgtgcacggggcgcacgagcggctgcgcgccgagcccgtgggcaccttcctggtgcgcgacagccgccagcggaactgctttttcgcccttagcgtgaagatggcctcgggacccacgagcatccgcgtgcactttcaggccggccgctttcacctggatggcagccgcgagagcttcgactgcctcttcgagctgctggagcactacgtggcggcgccgcgccgcatgctgggggccccgctgcgccagcgccgcgtgcggccgctgcaggagctgtgccgccagcgcatcgtggccaccgtgggccgcgagaacctggctcgcatccccctcaaccccgtcctccgcgactacctgagctccttccccttccagatttgaccggcagcgcccgccgtgcacgcagcattaactgggatgccgtgttattttgttattacttgcctggaaccatgtgggtaccctccccggcctgggttggagggagcggatgggtgtaggggcgaggcgcctcccgccctcggctggagacgaggccgcagaccccttctcacctcttgagggggtcctccccctcctggtgctccctctgggtccccctggttgttgtagcagcttaactgtatctggagccaggacctgaactcgcacctcctacctcttcatgtttacatatacccagtatctttgcacaaaccaggggttgggggagggtctctggctttatttttctgctgtgcagaatcctattttatattttttaaagtcagtttaggtaataaactttattatgaaagttttttttttaaaaaaaaataagttttctagcgagtgtgctttggccaaaagtttaacttggttctgaacaggtccaggggagagggtcctaaggctgacctgctgggctgcaggtggtgtacggggcctgccctgtggctgggcatccctcacggttccacccacaactctccagggagagaaacggttggtctagttttggcgtgtgtccggtaagacagcagctcgcgtttgagcactttgtgcgtgccagccctaattctgtgctttgcatacttaaatttacttaatcctataaagagaggcacaaccctgtgaggcacgggctcttatttccattctacagaagggaaaactgagtaaatctgcctgtggccattcctgtcaaagacaacacttgggcctttttttggctgtccactaaacatctgcttgaaatggataacagagaggaaacttctttggttctatgaccacaacagcttccaggaaggggtgggggtgggggcttagtgagtttttggacagaggagtggcacattctgaaccagcatcaagggatactcagttgagatgagatgggggatacagggctgggtctagcttcct

SEQ ID NO: 658 - protein, 474 aa, Homo sapiens
MVQQTNNAENTEALLAGESSDSGAGLELGIASSPTPGSTASTGGKADDPSWCKTPSGHIKRPMNAFMVWSQIERRKIMEQSPDMHNAEISKRLGKRWKLLKDSDKIPFIREAERLRLKHMADYPDYKYRPRKKVKSGNANSSSSAAASSKPGEKGDKVGGSGGGGHGGGGGGGSSNAGGGGGGASGGGANSKPAQKKSCGSKVAGGAGGGVSKPHAKLILAGGGGGGKAAAAAAASFAAEQAGAAALLPLGAAADHHSLYKARTPSASASASSAASASAALAAPGKHLAEKKVKRVYLFGGLGTSSSPVGGVGAGADPSDPLGLYEEEGAGCSPDAPSLSGRSSAASSPAAGRSPADHRGYASLRAASPAPSSAPSHASSSASSHSSSSSSSGSSSSDDEFEDDLLDLNPSSNFESMSLGSFSSSSALDRDLDFNFEPGSGSHFEFPDYCTPEVSEMISGDWLESSISNLVFTY

SEQ ID NO: 659 - DNA, 1425 bp, Homo sapiens
  source 1..1425: mol_type = genomic DNA
atggtgcagcaaaccaacaatgccgagaacacggaagcgctgctggccggcgagagctcggactcgggcgccggcctcgagctgggaatcgcctcctcccccacgcccggctccaccgcctccacgggcggcaaggccgacgacccgagctggtgcaagaccccgagtgggcacatcaagcgacccatgaacgccttcatggtgtggtcgcagatcgagcggcgcaagatcatggagcagtcgcccgacatgcacaacgccgagatctccaagcggctgggcaaacgctggaagctgctcaaagacagcgacaagatccctttcattcgagaggcggagcggctgcgcctcaagcacatggctgactaccccgactacaagtaccggcccaggaagaaggtgaagtccggcaacgccaactccagctcctcggccgccgcctcctccaagccgggggagaagggagacaaggtcggtggcagtggcgggggcggccatgggggcggcggcggcggcgggagcagcaacgcggggggaggaggcggcggtgcgagtggcggcggcgccaactccaaaccggcgcagaaaaagagctgcggctccaaagtggcgggcggcgcgggcggtggggttagcaaaccgcacgccaagctcatcctggcaggcggcggcggcggcgggaaagcagcggctgccgccgccgcctccttcgccgccgaacaggcgggggccgccgccctgctgcccctgggcgccgccgccgaccaccactcgctgtacaaggcgcggactcccagcgcctcggcctccgcctcctcggcagcctcggcctccgcagcgctcgcggccccgggcaagcacctggcggagaagaaggtgaagcgcgtctacctgttcggcggcctgggcacgtcgtcgtcgcccgtgggcggcgtgggcgcgggagccgaccccagcgaccccctgggcctgtacgaggaggagggcgcgggctgctcgcccgacgcgcccagcctgagcggccgcagcagcgccgcctcgtcccccgccgccggccgctcgcccgccgaccaccgcggctacgccagcctgcgcgccgcctcgcccgccccgtccagcgcgccctcgcacgcgtcctcctcggcctcgtcccactcctcctcttcctcctcctcgggctcctcgtcctccgacgacgagttcgaagacgacctgctcgacctgaaccccagctcaaactttgagagcatgtccctgggcagcttcagttcgtcgtcggcgctcgaccgggacctggattttaacttcgagcccggctccggctcgcacttcgagttcccggactactgcacgcccgaggtgagcgagatgatctcgggagactggctcgagtccagcatctccaacctggttttcacctactga

SEQ ID NO: 660 - DNA, 6069 bp, Homo sapiens
  source 1..6069: mol_type = genomic DNA
cactttcttaatggttttcaatatccattgatttattgttttgtggctttctcttcccctttacagctttggctttaagaaagagctggggaacagattttgcaccagaggctgattctttattccaatgctgaaaagaactaataaaaataatcacttggcttttaagcagaaagcttccatttacagtatttcacccttaccccgccccgttccaagccccttgttatctaacataatggttagaatacatttccgtctctccccttaataatttcatgcattaacatcctcttcacacactatacacacacgcacgcgcgcacacacacgcgcgcgcacacacacagcaaaaggaaaaaagaggcagcagaaatctcagctgtacttctagcccttttaaaaagtttgctctgtaaattggaatgaggtcagatttggagcttctcattgcacgcggagattattattgcatcgggttccaagccaatgggaagcccgggggaggggtttggcatgaggaagcgttggttacagcagctgattggctgcagccaagactgtgaaaggataaagaggcgcgaggcggaattggggtctgctctaagctgcagcaagagaaactgtgtgtgaggggaagaggcctgtttcgctgtcgggtctctagttcttgcacgctctttaagagtctgcactggaggaactcctgccattaccagctcccttcttgcagaagggagggggaaacatacatttattcatgccagtctgttgcatgcaggctttttggcttcctaccttgcaacaaaataattgcaccaactccttagtgccgattccgcccacagagagtcctggagccacagtcttttttgctttgcattgtaggagagggactaagtgctagagactatgtcgctttcctgagctaccgagagcgctcgtgaactggaatcaactgcttcagggaaaaagaaaaaaaaaaaaaaaagacttgcctgggaggccgcgagaaacttgcattggaagcttcagcaaccagcattcgagaaactcctctctactttagcacggtctccagactcagccgagagacagcaaactgcagcgcggtgagagagcgagagagagggagagagagactctccagcctgggaactataactcctctgcgagaggcggagaactccttccccaaatcttttggggacttttctctctttacccacctccgcccctgcgaggagttgaggggccagttcggccgccgcgcgcgtcttcccgttcggcgtgtgcttggcccggggaaccgggagggcccggcgatcgcgcggcggccgccgcgagggtgtgagcgcgcgtgggcgcccgccgagccgaggccatggtgcagcaaaccaacaatgccgagaacacggaagcgctgctggccggcgagagctcggactcgggcgccggcctcgagctgggaatcgcctcctcccccacgcccggctccaccgcctccacgggcggcaaggccgacgacccgagctggtgcaagaccccgagtgggcacatcaagcgacccatgaacgccttcatggtgtggtcgcagatcgagcggcgcaagatcatggagcagtcgcccgacatgcacaacgccgagatctccaagcggctgggcaaacgctggaagctgctcaaagacagcgacaagatccctttcattcgagaggcggagcggctgcgcctcaagcacatggctgactaccccgactacaagtaccggcccaggaagaaggtgaagtccggcaacgccaactccagctcctcggccgccgcctcctccaagccgggggagaagggagacaaggtcggtggcagtggcgggggcggccatgggggcggcggcggcggcgggagcagcaacgcggggggaggaggcggcggtgcgagtggcggcggcgccaactccaaaccggcgcagaaaaagagctgcggctccaaagtggcgggcggcgcgggcggtggggttagcaaaccgcacgccaagctcatcctggcaggcggcggcggcggcgggaaagcagcggctgccgccgccgcctccttcgccgccgaacaggcgggggccgccgccctgctgcccctgggcgccgccgccgaccaccactcgctgtacaaggcgcggactcccagcgcctcggcctccgcctcctcggcagcctcggcctccgcagcgctcgcggccccgggcaagcacctggcggagaagaaggtgaagcgcgtctacctgttcggcggcctgggcacgtcgtcgtcgcccgtgggcggcgtgggcgcgggagccgaccccagcgaccccctgggcctgtacgaggaggagggcgcgggctgctcgcccgacgcgcccagcctgagcggccgcagcagcgccgcctcgtcccccgccgccggccgctcgcccgccgaccaccgcggctacgccagcctgcgcgccgcctcgcccgccccgtccagcgcgccctcgcacgcgtcctcctcggcctcgtcccactcctcctcttcctcctcctcgggctcctcgtcctccgacgacgagttcgaagacgacctgctcgacctgaaccccagctcaaactttgagagcatgtccctgggcagcttcagttcgtcgtcggcgctcgaccgggacctggattttaacttcgagcccggctccggctcgcacttcgagttcccggactactgcacgcccgaggtgagcgagatgatctcgggagactggctcgagtccagcatctccaacctggttttcacctactgaagggcgcgcaggcagggagaagggccggggggggtaggagaggagaaaaaaaaagtgaaaaaaagaaacgaaaaggacagacgaagagtttaaagagaaaagggaaaaaagaaagaaaaagtaagcagggctggcttcgcccgcgttctcgtcgtcggatcaaggagcgcggcggcgttttggacccgcgctcccatcccccaccttcccgggccggggacccactctgcccagccggagggacgcggaggaggaagagggtagacaggggcgacctgtgattgttgttattgatgttgttgttgatggcaaaaaaaaaaaagcgacttcgagtttgctcccctttgcttgaagagaccccctcccccttccaacgagcttccggacttgtctgcacccccagcaagaaggcgagttagttttctagagacttgaaggagtctcccccttcctgcatcaccaccttggttttgttttattttgcttcttggtcaagaaaggaggggagaacccagcgcacccctccccccctttttttaaacgcgtgatgaagacagaaggctccggggtgacgaatttggccgatggcagatgttttgggggaacgccgggactgagagactccacgcaggcgaattcccgtttggggcttttttttcctccctcttttccccttgccccctctgcagccggaggaggagatgttgaggggaggaggccagccagtgtgaccggcgctaggaaatgacccgagaaccccgttggaagcgcagcagcgggagctaggggcgggggcggaggaggacacgaactggaagggggttcacggtcaaactgaaatggatttgcacgttggggagctggcggcggcggctgctgggcctccgccttcttttctacgtgaaatcagtgaggtgagacttcccagaccccggaggcgtggaggagaggagactgtttgatgtggtacaggggcagtcagtggagggcgagtggtttcggaaaaaaaaaaagaaaaaaagaaaaaaaaagaaaaaaaaaagatttttttcttctcttaatcggaatcgtgatggtgttggattatttcaatggtggggttaatatagcatgttatcctgtctatcttttaaagatttctgtataagactgttgagcagtttttaaaatagtgtaggataatataaaaagcagatagatggcgctatgtttgattcctacaacgaaattatcaccagctttttttcattcttaactctttaaaggattcaaacgcaactcaaatctgtgctggactttaaaaaaacaattcaggaccaaattttttctcagtgtgtgtgtttattccttataggtgtaaatgagaagacgtgtttttttccttcaccgatgctccatcctcgtatttctttttccttgtaaatgtaatcagatgccattttatatgtggacgtatttatactggccaaacatattttttcttttgtccctttttttctttcctttctttttacttcctttatttctttattccttccttttcctttttttcttttttttttctttttttttttttttttttggtagttgttgttacccacgccattttacgtctccttcactgaagggctagagttttaacttttaattttttatatttaaatgtagacttttgacacttttaaaaaacaaaaaaagacaagagagatgaaaacgtttgattattttctcagtgtatttttgtaaaaaatatataaagggggtgttaatcggtgtaaatcgctgtttggatttcctgattttataacagggcggctggttaatatctcacacagtttaaaaaatcagcccctaatttctccatgtttacacttcaatctgcaggcttcttaaagtgacagtatcccttaacctgccaccagtgtccaccctccggcccccgtcttgtaaaaaggggaggagaattagccaaacactgtaagcttttaagaaaaacaaagttttaaacgaaatactgctctgtccagaggctttaaaactggtgcaattacagcaaaaagggattctgtagctttaacttgtaaaccacatcttttttgcactttttttataagcaaaaacgtgccgtttaaaccactggatctatctaaatgccgatttgagttcgcgacactatgtactgcgtttttcattcttgtatttgactatttaatcctttctacttgtcgctaaatataattgttttagtcttatggcatgatgatagcatatgtgttcaggtttatagctgttgtgtttaaaaattgaaaaaagtggaaaacatctttgtacatttaagtctgtattataataagcaaaaagattgtgtgtatgtatgtttaatataacatgacaggcactaggacgtctgcctttttaaggcagttccgttaagggtttttgtttttaaacttttttttgccatccatcctgtgcaatatgccgtgtagaatatttgtcttaaaattcaaggccacaaaaacaatgtttgggggaaaaaaaagaaaaaatcatgccagctaatcatgtcaagttcactgcctgtcagattgttgatatataccttctgtaaataactttttttgagaaggaaataaaatcagctggaactgaaccctaaatcttgacttttgtcgttattatgcccaatgcctaagattggaaaggccctacagtatctggacactacacaatctgccttagctttaaaaaaataagttctcagaggagtcttgtcaaatgctaccttatcgaggaacattaaatgtctcttggccagatttcctctgaccctgaaaatgatggcatcagctgaatatgtgtcaactcaacacatgctttctaggaattttctgagtttaccatatttaaaaacgccctttgtcttggaatctgaaagagggggaggggcaacgtggacagaattcttcacagatgaaactggctagatgatctttttttcaagttggtgctcctggagctgctttctccttgatttgcccatgcttacctccagcagtggctgtaattggttttcgtgggttaaggacaaataaactgttattatcagtagattatacaggaggaggcttttaccgattatgaaatgcaaaacgtatgcatttatgcattttttttctcaagcagaaaggttgatgtgctacaatcttcattttttgccatgcccaacatggtgttaatgtaagagaactgcagcaata

SEQ ID NO: 661 - protein, 535 aa, Homo sapiens
MGIVEPGCGDMLTGTEPMPGSDEGRAPGADPQHRYFYPEPGAQDADERRGGGSLGSPYPGGALVPAPPSRFLGAYAYPPRPQAAGFPGAGESFPPPADAEGYQPGEGYAAPDPRAGLYPGPREDYALPAGLEVSGKLRVALNNHLLWSKFNQHQTEMIITKQGRRMFPFLSFTVAGLEPTSHYRMFVDVVLVDQHHWRYQSGKWVQCGKAEGSMPGNRLYVHPDSPNTGAHWMRQEVSFGKLKLTNNKGASNNVTQMIVLQSLHKYQPRLHIVEVNDGEPEAACNASNTHIFTFQETQFIAVTAYQNAEITQLKIDNNPFAKGFRENFESMYTSVDTSIPSPPGPNCQFLGGDHYSPLLPNQYPVPSRFYPDLPGQAKDVVPQAYWLGAPRDHSYEAEFRAVSMKPAFLPSAPGPTMSYYRGQEVLAPGAGWPVAPQYPPKMGPASWFRPMRTLPMEPGPGGSEGRGPEDQGPPLVWTEIAPIRPESSDSGLGEGDSKRRRVSPYPSSGDSSSPAGAPSPFDKEAEGQFYNYFPN

SEQ ID NO: 662 - DNA, 1608 bp, Homo sapiens
  source 1..1608: mol_type = genomic DNA
atgggcatcgtggagccgggttgcggagacatgctgacgggcaccgagccgatgccggggagcgacgagggccgggcgcctggcgccgacccgcagcaccgctacttctacccggagccgggcgcgcaggacgcggacgagcgtcgcgggggcggcagcctggggtctccctacccggggggcgccttggtgcccgccccgccgagccgcttccttggagcctacgcctacccgccgcgaccccaggcggccggcttccccggcgcgggcgagtccttcccgccgcccgcggacgccgagggctaccagccgggcgagggctacgccgccccggacccgcgcgccgggctctacccggggccgcgtgaggactacgcgctacccgcgggactggaggtgtcggggaaactgagggtcgcgctcaacaaccacctgttgtggtccaagtttaatcagcaccagacagagatgatcatcaccaagcagggacggcggatgttcccattcctgtcatttactgtggccgggctggagcccaccagccactacaggatgtttgtggacgtggtcttggtggaccagcaccactggcggtaccagagcggcaagtgggtgcagtgtggaaaggccgagggcagcatgccaggaaaccgcctgtacgtccacccggactcccccaacacaggagcgcactggatgcgccaggaagtttcatttgggaaactaaagctcacaaacaacaagggggcgtccaacaatgtgacccagatgattgtgctccagtccctccataagtaccagccccggctgcatatcgttgaggtgaacgacggagagccagaggcagcctgcaacgcttccaacacgcatatctttactttccaagaaacccagttcattgccgtgactgcctaccagaatgccgagattactcagctgaaaattgataataacccctttgccaaaggattccgggagaactttgagtccatgtacacatctgttgacaccagcatcccctccccgcctggacccaactgtcaattccttgggggagatcactactctcctctcctacccaaccagtatcctgttcccagccgcttctaccccgaccttcctggccaggcgaaggatgtggttccccaggcttactggctgggggccccccgggaccacagctatgaggctgagtttcgagcagtcagcatgaagcctgcattcttgccctctgcccctgggcccaccatgtcctactaccgaggccaggaggtcctggcacctggagctggctggcctgtggcaccccagtaccctcccaagatgggcccggccagctggttccgccctatgcggactctgcccatggaacccggccctggaggctcagagggacggggaccagaggaccagggtccccccttggtgtggactgagattgcccccatccggccggaatccagtgattcaggactgggcgaaggagactctaagaggaggcgcgtgtccccctatccttccagtggtgacagctcctcccctgctggggccccttctccttttgataaggaagctgaaggacagttttataactattttcccaactga

SEQ ID NO: 663 - DNA, 14087 bp, Homo sapiens
  source 1..14087: mol_type = genomic DNA
tgcagtgcgctttaaggaacatttcctgttgtccatcaggttccaggtctgcccccagggctagagctacaagatgcagccaactcagcacatgtggacctctggtggggagaaagagggcaacccgaaaggtcacttagcacagagtctgggcacacagtaggtatcaataaagatcgattgaatgttcatggtcaaagttgcttctagtgtgcccgtgctccgagcctctgagtgccaggagaatgcccagcgagtcccacttgggccatctcggaaggcttcctgtaggagagggcctttgagctgagacttcaaagctgggctgaatttccccgagggtccagaagagagccacgggctggtgtgtcaggcagcggagctgacactcccagaaagcaagatcttcgaactacagggtgcgcgcaggctctcgcttctctccaccatggggggccctgcagtactcgccaagagcgtagaatttgcctagtattagccacgagagggcggggtggggcgaggcggagcagggccgaggtggcggagtgggggggagccggagagcttcataaagccacagcaaagcgctgcgactctagtgacagcggcccgctggagaggaagcccgagagctgccgcgcgcctgccggacgagggcgtagaagccaggcgtcagagcccgggctccggtggggtcccccacccggccctcgggtcccccgccccctgctccctgcccatcccagcccacgcgaccctctcgcgcgcggaggggcgggtcctcgacggctacgggaaggtgccagcccgccccggatgggcatcgtggagccgggttgcggagacatgctgacgggcaccgagccgatgccggggagcgacgagggccgggcgcctggcgccgacccgcagcaccgctacttctacccggagccgggcgcgcaggacgcggacgagcgtcgcgggggcggcagcctggggtctccctacccggggggcgccttggtgcccgccccgccgagccgcttccttggagcctacgcctacccgccgcgaccccaggcggccggcttccccggcgcgggcgagtccttcccgccgcccgcggacgccgagggctaccagccgggcgagggctacgccgccccggacccgcgcgccgggctctacccggggccgcgtgaggactacgcgctacccgcgggactggaggtgtcggggaaactgagggtcgcgctcaacaaccacctgttgtggtccaagtttaatcagcaccagacagagatgatcatcaccaagcagggacggtgagtgcggcgcgccggcccttggggcctctgtgcccgcgccggaacaagaacgtctcgtctgtttttctggctcgacaatgcttctgactccgtgtccctcactgctttggcttcagcgtagggagacaggggaatggggttgttaggaggacagggaaagctccggaggggcgtctgtgcccaggctgttgcaccaacagccagaggactcacaagggagacgggtgagtgcgggacagtgagaagtcaccttgatttaggggaagggtgactgtggcttcacctagaattggtgtgcgcccctgccccactctctactgtagaggagtcgcagcgggcagtgaaagcctgtgctctgggcggacaggacgcctgggcctcctgtgtgggaaactggaggggaagggagccccttatctccgggccccctgcgcccacctcccccggctcctttgctgctggtgtgctcaggtcagctttagtggtggtagtggtggtggtagcggtggtggtggtgtgtgtgtacggggggagattgggatttggtgacatggagaagcagtcgccaagtttcctttccggtcttactttgagatcatatgtctggtgtgtgtgtgtgtgtgtgtgtgtgtgtgtgtgtgtgtgtgtgtgtgtgtgtgtgtatgtgtgtgtgggtgtgtgtgtatgggggctagtgcagtaaagcttgtagggggcacagatcccttccaggcacaaatgcccacgggctgggcagatgaagctcacccaggggtccagcctggtagccagccccacactgcaccctttgaggctggtccagtgaaaaccttccccacactcctgtccagaaattcaccggttcagcctggagaagtggggaaggggtgtcccatggcttcatggctcagggttcctgagccccgtgcgtgatggggagagtttggggctgagggtgctgcttccggatagagcctcctgcgcaaggaaagaaacagaaacctgtgacttgtgtggtatttgtttagtaagcaacccccggagtggactgtgtctgatgtgggctgtgcgcacccacccttcccagtgcggcccatgtgagcaggggaccagcgaggaccagtgtggaagggctgttgtcattggtggacctgggatgctgggtcccaggtccgagaggtgtggataccaaacgtggggcttggggtggaggggagagggagaaggccatgttggaccccagaggttggtattcgatctgggcattgctggaacattcttccctccagatgatttttgtggggtagcctgggactggggaacctgttgccagccacaactggcttcaagttactgagctgttccactttccctgggatgaacccaggaaagttggcgtgttctttgatggctcagccttcatctcttaagccttctgataatttctctctgctccccccaaccctagtcaccctttgggtgtacccagacacagcccaagcttctggtcccaatgtgtctgaattggaagggacccagaagatcctgtccctctcactgcacagacagggaaacaggcccagagatagcaagagactcttccaaggtcacacaacacactcattgcaggcagagctggcactacagcccagatagtatttgcttgggtttctttctctggccccctacggccaccagtaaaaacagccacccacgctctctgaaggccctgatgcattcagagtgctttcacttccattatttcactgtgcgttaggtaggccaagcagtctccccattttacagttgaggtcactgagttgcagggtcagctaggggcttgcactccatcacacagcagaccagaagtggggcctcttaaccttccactctgttgtgtggtcaggaggacttcccaccctgggcccttgctggggtctccccacagcctctgccaggcctctgcctcctcctgccagtcttgagggatggggtggatggagcatcagccagcactctagggagttggccagtgctagggggctgcctctctgcctgtagagccagcttcagggaggctgtagagcacttcagggaggcacttgaggggatgattctcgaagtgtgtatcaccatctctactcccatggcctcctttccttggtgttcctgctgagtaattctcacttgacaagtttttttgtcccccttttagatacatacacttacatttttttattatgaaaaattccactacatacaaacatggacagaagaatgtaacagacttccatccccagcttccacagttgtcaatatgggtccaatcttgtttctgcatcctcacttcgcttcttctgtctgcaactatattagtaatatagtaattactaagtacattctagatattattttatctctgcacctctaaaaatgactttttaaaatgaatgcattaccattagcaaacctgaaaagaatttcctaaatatcaccaagcttctctgattgcttcataaatgtgtgtgtgtgtgtgttttccaatcctcacactttttgctccattctgaggggctccatacgcggggtccctgttgaaggaggcagtggctcttcactgtttcttttggtgctttttcttggatcaggcttcatagaccccacgctgccatggaggggacagaggacacacaaccccaattcagtcccactagccccaggttacctccataccttctcagcttgggctcctgagatctgggaaatcagtggccatttcctctcaaaacaggcttttgggcttatagcacagcttcctttccgtcttcctgcttttgtgggctggcctatccctccgtgggttccagtgacccaccagtcacaccacatcacccatgaccttcttcctttttgaaaggttctcccacctcaggcccacctacagcctacagccccacggctttttgccttgagctgactcacgccgtcccggattcttcctctcccacccaccctggatctatccctcggtattgaccagcgccagtggcatgctcttcccaacgggcagaaatggggcagggcacagggggtgattcctgggtctggagattgatcaaggcagctcagatggggctgagagaggggaactgagaacaaaacggtggattatcccagtaggagactttggtgtctacgtttgtgtctggagatttggggcagcctgataatgccccacacaggcttgtgcgagggtttctgtgtggcagtgtgtgtgtgttgcgaatgtgttggcgagtatataatagttgatggtagacattctcagtagaggaagagagaggcctgtgtctctgtgggtgtgtgggtgtgtattaattgctggcaatccccactttctgggtgtgattggttgattattataattaagataactttgggtagctgtgttgtgttaagctcaatctgcatttggatttgtgcatgtgaagacagaggttggtaaaacaacaatttcagtcccacactatccttgctatcctcacagtcattacaatttttttttgtctccactttcccaactccaagaactttaatttttttatttgtaatatttttcatgggccaggaagtggacttgaacctcccacatagataactttagtcgataactttctacatctttttttttttttgagatggagtctcactctgtcccccaggctggagtgcagtggctcaatcttggctcactgcaacctgcacctcccaggttcaagtgattctcctgcctcagcctcccaagtagctgggattacaggcagaagccaccaagcccagctaatttatgtatttttagtagagacggggtttcgccatgttggccaggctggtcccaaacacctgacttcaagtgatcccccgcctcggcctctcaaagtgctgggattacaggtgtgagccaccgcacctggcccaacttttcagatcttaaaaaattttttttaatttattttttatggagacagaatattactgtgttgcccaggcggtctcaaatccctgatctcaagcaatctcccgcctcagcctcccaaagtgctgggattacaggcatgagccattgtgcccagctaaaaacattttttttaggcttaagcatgcttaactggtttcatttgtcttggggcaagtgaaaacaactttaattaaaaattttttttaaatgagacatggtcttgctctgtcacccacgctggagtgcagtggtgcgattatggctcactgcagcctcaacctgctgggctcaagcaatcctcccatcccagcctcctgagaaactgggactataggcgcacatcaccatgtccggctaattgtttctattttttgtagagatggggtctcactatgttgcccaggctgcagctttgctttttgtctggctgtttgccagtggctgtctgagtctattaagtggatctgaggttggtaagacgaggagttcccttgatgcccaagcacattttgtactttggtaggtacgacacattgccagaataccctcccaaaaggtgctaccaatttacgcccacaccaatagtctatgagaggacccattttctcacagcctcatcagcagtagatattatcacattttttttttttttgagacaaagtctcgttctgttgcccaggctgaagtgcagtggcatgatctctgctcaccgcaacctccgcctcccaggttcaagcgattctcccacctcagcctcccaagtagctgggattaccggcatgcaccaccacgcctggctaatttttgtatttttaatagagatggggtttcaccatgttacccaggctggtctcaaactcctgacctcaggtgatccacctgcctcggcctcccaaagtgctgggattacaggcgtgagccaccacgccgggccaatattatcaatttttaaacattgaccaatatgactgagaagaactatctatctccttgctattttaatttgcacttaattacagtgaagcagagcctgtgccaggagctccgaatctgggagaggtatgacgaccctgtgaaccatcccaaggctacttagttcttagggccagcagaggaatttggggtcttggaccctgtcttatgagggtgggatggtaagtggcctttagggacgctcaatttgacaccagacccatcaccactctcggttccttcccagcaaagtgtcatgtaaatcaggggctattttgggattccagctggtggtgattctagacttttagggagaaaccgagatctcctttctcttctcccttttccccagcctcttcctgtgtctccatttccctctactagtgataaaaacaggatgagctgggcatggtggtgagcacctataaccccgctcgggtgactcgggaggccaaggcaggaggattgcctgtgcccaggcatttgagcagagcctgtgcagcatagcagactccatctcttaaaaaaaaatcagtatggcctggcgcggtggctcacccctgtaatcccagcactttgggaggtcgaggccagtggatcacctgaggtcaggagttcgagaccagcttgattaacatggtgaaaccccgtctctactaaaagtacaaaaattagccaggtgtggtggcgggcgcctgtagtcccagctactcgggaggctgaggcaggagaataatggcgtgaaccttggaggcggagcttgcagtgagccaagatcacaccactgcactacagcctgggcaacagagcgagactccgtctcaaaaaaaaaaaaaaaattagccaggcgcagtgttgggtgcctgtagtcaaggagaatctcttgaacctgggaggcagaggttgcagtgagccgagatcacaccactgcactccagcctgggggacagagcgagactctgtctaaaaaaaaagaaagaaaaaaatgaatatgaagaaatggggaccacagagcacagcatgcactctgcagtcagaagacctcacctctgctctcccaccgaggaccgtcaccaaacctctcggagcgtcagtttcttcaaatataaaattggaaataacattttattttttattttttctttgagatggagtctcacactgttgcccaggctggagtgcagtggcgccatctcgggtcaccgcaaccttcgcctcccaggttcaagcgattctccttgcctcagcctccaaagtagctgggactacaggtgcatgccaccacaccaggctaattttctgtatttttagtaaatatggggtttcactatgttggccaggctggtctcgaactcctgagctcaggaaatccaccctcctcggcctcacaaagtgctgggattacgagtgtgagccactgtgctgggccatctttcgaactttttaacagctttcagaggaaagatggacaggagttagactctccatttacatgtgaagaaactgagatttgggctgggtgcagtggcccatgtctataatcccagcactttggaaacctgaggcgggtagaccacttgaggtcaggagttcgagaccagcttggccaacgtgaaactccatctctactaaaaatacaaaaattagccgggtatggtggcacatgcctgtagtcccagctcttgggaggctgaggcaggagaatcacttgaacctggaaggtggaggttagagtgagctgagatcacgccactgcactccagcctgcatgacagagcgaaactccatttcaaaaagaaactgagatttggcttgagaattaacttatccagggtcatagggtagtaatctatttttctcaactcaggaaagtcaggggaagacaggcgtgtgacagcacccttctaggacaccttcccaaggttgttaggtaagttgtcctggggacctctggggattagaagtccctcaaaaacagttcctaggcccctggaaccctccctcctccaggtttcctgactcagataggtccctttttcctcatccttcagggcttctcatgagaggagggggaagtgtgtggaaatgaaaaataattctgatgaggattagcttctgccattctgaaaactctgctcttcctgcttgtgttagaagagaaaggctaagccattggagctggtgatggaattggtgctggtggaggtggtggttgtagtgacggtactactggtggtggttgtgatggtgaaggtggtggctgtagatggtggtgcccgtgctggtgctggtggagatcgtggttatcgtgatggtggagggggcagttgtagtgacggtggttgtgatggtggtgatgggtggttacagtgctactggtggtgatggtgctggttgtagtggtggtggtgacggggctagtgaaggtgttagtggtggagatggtgatggtagaagagtgcttcttttctgaatctgttactctggcacaacagcggaatcatacagcatcccaccccctaacttcctctacttttcctggaaacaaggactttgaacatgagccccgtgttcaatagagccttctttcaggtggatgggaagctccctgttcaactaggatgtgtgcaacttctctaaaggctgagggcagactataccgcaggtggcagacccaggagcatgggagagggagggcctgtgagtgggtgtcatgggtctgggagtgtgttagcactgtgagagccacggcagagagggtggctgaggaactgaggcgtgaggaccttccaggaactgcctgtggagagctggtggtgccccctcctaggaagcagctaaggttagagacaggggtgtgcaggtagatgtcgagcaactgaccctctgaaagaacattttaaaaaactctgatttgtagtgtttgctgatccctgtggtgtaaatactcctgctatggatgatttcaagcgactcatgtgagtcattgaacacagagccgggaagagactcacagtgcactgtgatttagtacctcctccatgcagctgcgatagacggaagtaacctcgacagtgcagacaatagtaaaacgtaaaataactgggcagtgatgattttttagtttttactccttttttttttttttgagatggagacttgctcttgtcatccaggctggagggcagtggcgcgatctcagctcactgtaacctctgcctcctgggttcaagccattctcctgcctcagcctcctgagtagctaggattacaggcgcccacgaccacacccagctatttttgttgttgttgttgtactttttagtagagacggggtttcgccatgttggccaggctggtctcgaactcctgacctcaggtgatccgcccgccttggcctctcaaagtgctgggattacaggcatgagccactgtgccgggcctactttgactgttaatatgtcttgaattgcaagtttatataatttaatttttaattatggctgtgtttaaccactggctggcaaactccctaaacaccttccagctggttcttgtgagtgggaggaagccggctacagcacaccactgatgcctgggcactgttgcaggggggactggctgtcaagctggagctgatgggtgctgggggctttctctcttctctccaggcggatgttcccattcctgtcatttactgtggccgggctggagcccaccagccactacaggatgtttgtggacgtggtcttggtggaccagcaccactggcggtaccagagcggcaagtgggtgcagtgtggaaaggccgagggcagcatgccaggtgcgcgcgcccctgggagcggtgggctctgtttcgctgggactgggcgccccctggtgggcccaccaagcccctacccctaattcctagacctttaaccccctcccactccatcccacgccattgcatccctcctgtttctggcttcctgctttgctctagcctgtcctctgctgagtcctctgcccttccctgcctggtcctccccctgtgtccttccttacgtccctctcgggacaggcaaagccctacatcaccagggttctgtcccgggggctgcatgtcaaagaggtgaactgtccacaggaaaccgcctgtacgtccacccggactcccccaacacaggagcgcactggatgcgccaggaagtttcatttgggaaactaaagctcacaaacaacaagggggcgtccaacaatgtgacccaggtaggacctgctcttcaaaaggtagcctcgccctgctccccaccctgggtctgagacctccaaggccacaagggtcctgcggggccagtttggttcattttttcttccttcctacaggaaggaaggttcgtttttcttctgtcctaaacgaagggtcatttttcctccttcctaaactctggctgtttctcacccaccttgggaggaagatgagatgggatgaagctgaatcttggacgggggtcatattcaggccacacaggccaacccagcctcagggtttcttcaccaaatcatgggttgccattgctccggcaccatgaaaggcacagagttggccctgtggtcccagggaatagatgccgagtttctctaggttgaacaatcctgttaaaagtgcccttgctggctgggtgtggtggctcacacccataatcccagcactttgggaggccaaggcgggtggatcacaaggtcaggagttcaagaccagcctggccaagatgatgaaaccccgtctctactaaaaatacaaaaattagccaagcatggtggcgggtgcctgtaatcccagctactcaagaggcggaggcaggagaatcgcttgaacccgggaggcagaggttacagtgagctgagatcatgccattgcactccagcctgggtgacagagtgagactccgtctcaaaaaaaaaaaaaaaagaaaaaagaaaaaagaaaaaaaagtgcccttgccctaaagccctgtttgtgctgataccttggtctcaattgacatctggaggtagaagagggggcaagaggctagaattggtgccccaaagagtccggacactggagttggaaagcttgggggaagttacatggtggcagagcaggggaatggacaggatgacctcaaggtgcttgctagcctcacgtggggccagctgttggtgggggtgatgggatcctcgaaatccttcctccccacccctacaaccgtcttgctctgtctacagatgattgtgctccagtccctccataagtaccagccccggctgcatatcgttgaggtgaacgacggagagccagaggcagcctgcaacgcttccaacacgcatatctttactttccaagaaacccagttcattgccgtgactgcctaccagaatgccgaggtgagggctgcctgagccccggtggggaggagggcagagtggggcccactgtcttccttgggagggatttggaaagttcccgagccccagactcaggactcaggtgactctatttcccttctctctagattactcagctgaaaattgataataacccctttgccaaaggattccgggagaactttgagtcgtaagtgccactgggttcaactcagctttggtccctcctgagacacatcctctccctgcccctgaaaacaggagggtgggggacagatgctacaggtgggcaggccagggaaggagggtcggagaaggaatgtgtgaaacaggtaggctcacaggtgactggttctgcttgtgacccgttttcttgccttctatttttttctagcatgtacacatctgttgacaccagcatcccctccccgcctggacccaactgtcaattccttgggggagatcactactctcctctcctacccaaccagtatcctgttcccagccgcttctaccccgaccttcctggccaggcgaaggatgtggttccccaggcttactggctgggggccccccgggaccacagctatgaggctgagtttcgagcagtcagcatgaagcctgcattcttgccctctgcccctgggcccaccatgtcctactaccgaggccaggaggtcctggcacctggagctggctggcctgtggcaccccagtaccctcccaagatgggcccggccagctggttccgccctatgcggactctgcccatggaacccggccctggaggctcagagggacggggaccagaggaccagggtccccccttggtgtggactgagattgcccccatccggccggaatccagtgattcaggactgggcgaaggagactctaagaggaggcgcgtgtccccctatccttccagtggtgacagctcctcccctgctggggccccttctccttttgataaggaagctgaaggacagttttataactattttcccaactgagcagatgacatgatgaaaggaacagaaacagtgttattaggttggaggacaccgactaatttgggaaacggatgaaggactgagaaggcccccgctccctctggcccttctctgtttagtagttggttggggaagtggggctcaagaaggattttggggttcaccagatgcttcctggcccacgatgaaacctgagaggggtgtccccttgccccatcctctgccctaactacagtcgtttacctggtgctgcgtcttgcttttggtttccagctggagaaaagaagacaagaaagtcttgggcatgaaggagctttttgcatctagtgggtgggaggggtcaggtgtgggacatgggagcaggagactccactttcttcctttgtacagtaactttcaaccttttcgttggcatgtgtgttaatccctgatccaaaaagaacaaatacacgtatgttataaccatcagcccgccagggtcagggaaaggactcacctgactttggacagctggcctgggctccccctgctcaaacacagtggggatcagagaaaaggggctggaaaggggggaatggcccacatctcaagaagcaagatattgtttgtggtggttgtgtgtgggtgtgtgttttttctttttctttctttttattttttttgaatgggggaggctatttattgtactgagagtggtgtctggatatattccttttgtcttcatcactttctgaaaataaacataaaactgttgaatgtgcctgcctcagtgccagcatggggggacatggatggggactcagttggggttgtacccaagctggtgtacccaaggtgttctgtcagctttcatttatggggaacctgctaagaccctgaaatgactccagctgagttacagcaaggccacatgtcctaccttcagcactcagggggttggttgatgctacctcttaaggcatcttgggacggacagagaagaatcccttgccctgtgtgcaccctgacattgaaaggaggggtgtgagggcaaggccaagggctggactgggagcgggggtgcagggcgctgtgaggcggtggcacttgatttttctttgcatttctagcagccctccacctttatctctagggttattcaaggattaaagaaataaatataaaatgagccatgtgaaattaccatttttgtaggtcgaaaagccaaatattagcaattttatgtgactcaagctaatacatgtaaagggtttaagaacattgcctgacaaacagtaagcactcactgtgtaagctactgttaccaacagtttctagctgtttctgtctgtctttttatacacactgaattgtgtt

SEQ ID NO: 664 - protein, 770 aa, Homo sapiens
MFPQSRHPTPHQAAGQPFKFTIPESLDRIKEEFQFLQAQYHSLKLECEKLASEKTEMQRHYVMYYEMSYGLNIEMHKQTEIAKRLNTICAQVIPFLSQEHQQQVAQAVERAKQVTMAELNAIIGQQQLQAQHLSHGHGPPVPLTPHPSGLQPPGIPPLGGSAGLLALSSALSGQSHLAIKDDKKHHDAEHHRDREPGTSNSLLVPDSLRGTDKRRNGPEFSNDIKKRKVDDKDSSHYDSDGDKSDDNLVVDVSNEDPSSPRASPAHSPRENGIDKNRLLKKDASSSPASTASSASSTSLKSKEMSLHEKASTPVLKSSTPTPRSDMPTPGTSATPGLRPGLGKPPAIDPLVNQAAAGLRTPLAVPGPYPAPFGMVPHAGMNGELTSPGAAYASLHNMSPQMSAAAARGRRGRYGRSPMVGFDPPPHMRVPTIPPNLAGIPGGKPAYSFHVTADGQMQPVPFPPTPLIGPGIPRHARQINTLNHGEVVCAVTISNPTRHVYTGGKGCVKVWDISHPGNKSPVSQLDCLNRDNYIRSCKLLPDGCTLIVGGEASTLSIWDLAAPTPRIKAELTSSAPACYALAISPDSKVCFSCCSDGNIAVWDLHNQTLVRQFQGHTDGASCIDISNDGTKLWTGGLDNTVRSWDLREGRQLQQHDFTSQIFSLGYCPTGEWLAVGMESSNVEVLHVNKPDKYQLHLHESCVLSLKFAYCGKWFVSTGKDNLLNAWRTPYGASIFQSKESSSVLSCDISVDDKYIVTGSGDKKATVYEVIY

SEQ ID NO: 665 - DNA, 2313 bp, Homo sapiens
  source 1..2313: mol_type = genomic DNA
atgttcccgcagagccggcacccgacgccgcaccaggctgcaggccagcccttcaagttcactatcccggagtccctggaccggattaaagaggaattccagttcctgcaggcgcagtatcacagccttaaattggaatgtgagaaactggcaagtgaaaagacagaaatgcagaggcactatgtgatgtattatgaaatgtcatatggattaaacattgaaatgcacaaacagactgaaatcgccaagagattgaatacgatttgtgcacaagtcatcccatttctgtctcaggaacatcaacaacaggtggcccaggctgttgaacgtgccaaacaggtgaccatggcagagttgaatgccatcatcgggcagcagcagttgcaagctcagcatctttctcatggccacggacccccagttccccttacgcctcacccttcgggacttcagcctcctggaatcccgcccctcgggggcagtgccggccttcttgcgctgtctagtgctctgagtgggcagtctcacttggcaataaaagatgacaagaagcaccacgatgcagagcaccacagagacagagagccgggcacaagtaattccctcctggtcccagacagtctaagaggcacagataaacgcagaaatggacctgaattttccaatgacatcaagaaaaggaaggtggatgataaggactccagccactatgacagtgatggtgacaaaagcgatgacaacttagttgtggatgtgtctaatgaggacccttcttctccgcgagcaagccctgcccactcgccccgggaaaatggaatcgacaaaaatcgcctgctaaagaaggatgcttctagcagtccagcttccacggcctcctcggcaagttccacttctttgaaatccaaagaaatgagcttgcatgaaaaagccagcacgcctgttctgaaatccagcacaccaacgcctcggagcgacatgccaacgccgggcaccagcgccactccaggcctccgtccaggtctcggcaagcctccagccatagaccccctcgttaaccaagcggcagctggcttgaggacacccctggcagtgcccggcccatatcctgctccttttgggatggtcccccacgctggcatgaacggcgagctgaccagcccaggcgctgcctacgccagtttacacaacatgtcgccccagatgagcgccgcagccgcccgcggccgccgtggtcggtacgggcgctcccccatggtggggtttgatcctccccctcacatgagagtacctaccattcctccaaacctggcaggaatccctggggggaaacctgcatactccttccacgttactgcagacggtcagatgcagcctgtcccttttcccccgacgcccctcatcggacccggaatcccccggcatgctcgccagatcaacaccctcaaccacggggaggtggtgtgcgctgtgaccatcagcaaccccacgagacacgtgtacacaggcgggaagggctgcgtcaaggtctgggacatcagccaccctggcaataagagccctgtctcccagctcgactgtctgaacagagacaattatatccgttcctgtaaattgctacccgatggctgcactctcatagtgggaggggaagccagtactttgtccatttgggacctggcggctccaaccccgcgcatcaaggcggagctgacgtcctcggcccccgcctgctacgccctggccatcagccccgattccaaggtctgcttctcatgctgcagcgacggcaacatcgctgtgtgggatctgcacaaccagacactagtgaggcaattccagggccacacagacggagccagctgtattgacatttctaatgatggcaccaagctctggacgggtggtttggacaacacagtcaggtcctgggacctgcgcgaggggcggcagctgcagcagcacgacttcacctcccagatcttctccctggggtactgccccaccggggagtggctggcagtgggcatggagagcagcaatgtggaggtgctgcacgtgaacaagcctgacaagtaccagctgcacctgcatgagagctgcgtgctgtccctgaaatttgcttactgtggtaaatggtttgtgagtactggaaaagataacctcctcaatgcttggcggaccccctatggagccagcatattccagtccaaagagtcctcgtcagtgcttagctgtgacatctctgtggatgataagtacatagtcactggctcgggggacaagaaggctacagtctatgaagtcatctactga

SEQ ID NO: 666 - DNA, 32708 bp, Homo sapiens
  source 1..32708: mol_type = genomic DNA
cttagatctgaggattttcattaaagggaaaagtgagcaagtggcaggatttttgctaactcgagccctcagcttccccggctgcacgctcgccagtccctcccgctagcgcgcgcccgcgcgctctctagccagccccacgttactttgattgacagcccagccccgccgctctccttcccaccgaccttcccatcatcagtgccaatctccgcgaatcgccgcttcccattggctggttttggcgtcccgcggctcctccaggaacagttcctcaccaagcccgggaggacgcggctggcggaggaggggccgggatgggaagggagaccgaggagacggcggagatggaagcgagaggagggggggagggagaacgccccgtccggcgctgcgctgccatacgctccggggaggagcgcgtcagcgccccacgttggttgcagcgcacgcgattggctgatgcgggccttctgccccccccccaccccccaacctcccgggctcacgtcccccgccggctccgcgctcgcgccccccgcccgaacggggctgggcggggccggcgctggttagctccggagtgtgaaaccgcgtgttaatgtaagcggcgcgagaggcgcgggcggcggcggcggtgggagcggcggctgcagaagcagcagcagcagaaacagcggcgggtactctgtgccccgcgtcccggaggcagccgactgcgccaccccaccctcgcacggccgggcgggacccgcgccaccagcccggacctccgtcgtcccgcggcgaccaaaacccccgctggccccaccgctgtgactactctggactcgcccgcagagtttgcccgccggggagggtggccgattggcggagcgcactcctgctgttttccccaccatctcgtggatgtcgtccctcgggtggtgagagaactttgcagtgggctggagcgccctttgcggagaagcacacgaaggtgaaggaaggaaagaaagaagaccgaggaagaaggagctcggaagaagggtccggagcggccggtccggccgtgcagggcgagtgcgcccgaggcgcggcgccctgatgctccccgggctcgaggagcattgggcacttgcgggactgctctcggtggagtagccccgtcgggcccggagggtttgtgcaaccgcggagaacaccgagtgctggtcgcacggggcgtgccgagccgcctcccggcgcgccctccgcactttccccgcctcgtcatccgtcgctccccggccaggagcctccgctgcgtcttcaacctcgctcccctttgcgtcccgggagcctgcgagcacccggccgaaggcgcagccgaatcttgcgggagtcgccccgaaagcgtcgggtttgtgtggggttagcgggggccgccgcgccacctgcacctcgcccgccgccgcctcggggaaagcccgaagaggaggcggaccaggagaagagcaaagaaaagcagtccgtctggatttgtttgcccaggactggcgccgcgcacgcggatcgccgaggggagtgcggtcggagtcaccgcgcccccgcctccccgcccgggcagctgaggccgggggttggagcgctgcccccgcgcacagtccccgagcgcccgacgtctccgcgcaggttcttgaagcagctgggcctggggcgcccactaatgtggccctgagggccggagcccgcaccgacgggagcgggagccggagcagctgcgggcgccgagtggccggtgcgcccggcggagcgcgcgtgcgtggccagcgcgctccccgcttctgcttggctttccggcttaattttcctcggcgggattaaagttggaaattgaccggagaattgagttgccggggaacagagccccggccgccgccagagcgatgttcccgcagagccggcacccggtgaggcgcggctgggtggtggtggggggccaggatcgttggggaggcgcttctcccgggcggtagggagactggtggcttctgaggcccggcggaccttctcgccctcagcggtgtaaggctggggaggtctggggccctctcttcctggggtggggagtgggccgaaactcttaattttctccctccctttgggctccttcctacttgacgtctataccgagcggacaggggcgctggggaaggctggggtttctctcctgcagccatatcccctctaccttccccgagtgggggcagggcgcccccccctttgtttctcctctcgcctatttacatgtcaatgcggccccggttccggtgcgtctggaggtggccccggcgactctgggaatggggagcgtaaaggagttgtttttctcctctggtccccggggtcattatcgccgccgtgggggaaggggcggcgacaccgacaatctggcctggtcttccctggccgccggggagcccccttccctttggcctggtgacccgggcgcacttagcgcaatccgccctggagactgggaagagcttccgagcctctttagaagccggggcccggggagggtccgctttccccctccccatagtgaagggcaaactcgagtttggggcctcgttttcagccacttctaactttatgtttatgtcccacccgttcttgccttctctgacttactgctttattcatccgcccgcattcccgtccctcggtccccctcgctggtcgcccccagacgccgcaccaggctgcaggccagcccttcaagttcactatcccggagtccctggaccggattaaagaggaattccagttcctgcaggcgcagtatcacaggtgcgtgtccggccgcgccatgcgagtggtcgcgggcgtcccggtgccccttgcacccagccgggtggcggcggcgcctgtacttagttcttgcgtccaggcggtggcgtgtggagtctcagttaagacctgtcattcaagttaccccctttcctggttcttcccgggccgcctcttctcttgtctcctcctcctcccattgtttcccttttgccggtttgcactgttccagggagtcctttttcatgtctttaggagttgcatgagaatcgtcaatatttgcacttcatgtatttatttttcagcagactgagctgaaacattggttcaatcgatgtctcagtcctggagtgtgggttcagggaagcaaagccatgttgaaatcgctgtttgccatactagaaaattgggttttctgaggcaaagtccattaaggaaggctagatgcttataacattgcccatcattggtgatggtgagggaggtgggtataatagtataaagaagaaagctcacctgctttggcgtcatttcggattggtttgggtaggatgagagagtggagtcacatttatatccatctcagccttagtttcttcaagtaatgagacttaccttcaaaggacttataaatttttgtaaaatactttgccaatagtgaacttcccagaaaggttagtttctttcccttgttcctatgaagttttacctgattctaactcagaaataactgtattgacattttttgcttttgtcatgcttgagaaaaagcacacagatgaggcgaagtggcttgggtgtgaattttcttactttgtcaggggctttctcattattgaccttttgtctacttgtagataatatctctgcagcttgaggcatacttgcacacaccgtgtttacccagcagggagaacttcaacccactttattgcagtagctacttgacatattttggcagggatttaaaaaccaaaggttttgaaagggaccagcaattgtaggagtaacttaacagataggattttcaaacctagagaccgtttgagttggcaaagatggcacagcctatgcctaagagtgaagattgtgcaagggccggattttggtggagtacagagaaacaaactgatgcaggaaggtagggagcagatgaccatgaggaggaatcagttagaggttctgacagatttttttcattcttgtcatctaaccagataggcaccaagaagaatggtagctgaatggacaccttgtattgttcacattattccttttccctattaaatgcaaggacaaagcttttgggtgtttacctagatagtttatggcttttccaaattggtctgtgtttttacttgaagtgcaaatatgtgaggcagatgttaaaacaagtgacataatgtttacattaagttgcctgttttgttttcctagccttaaattggaatgtgagaaactggcaagtgaaaagacagaaatgcagaggcactatgtgatggtaggtatcaaagattggactttttcctttttcatatgatattagcaaacgtgttagcagagtgtaaaaaacatgagttaatgaaatgcttgattcttttttctctttacagtattatgaaatgtcatatggattaaacattgaaatgcacaaacaggtaagctttagttgaacttcaagctgaaatgagacatcagttcatatgatttaataatactggctttgttctcagtagtgggctctaggggtgggggtttgtatgctatttttctgccttggtttcctgtcctgtggattgatggtagtattctgcatcaagggttgcttcttgataattacaagtgtttaaatgactaggagagggagaggtgttttggaaatataaactagcctctttattgacagataggaattaagacttgagtttactttttcacctgtatagatttatcctcttgaaagggctgggtatcttctacagttgctgaagtttagaatagttaatgtttttgtgctgttttgcaaggaagtgtggacctgttggggggaaagaagggtattcaggagttttttttaatcgtggtaatcaaggtatatgactatctgtggagtattctttatgctttggggctgcatgaagcaatagtcaggattagtggcttattagcaaacaaatttttgaaaaatttctcagttgttgcaggtgtggatgtgaaaaaagcatctttttatggccagagcatatgttgggagttgcttcagtcctagtggtttttaaagcatgaaaagattagtgactggaaagctctagcaatgactatgagtttgcaagttcccataaaattcacacttatggctactataatggtgtataaaaagagtattgagctggaacaaggcactaaggacctcataagagaagaaaagctaaatgattgctcagcccaaaggaccctcgattgagtagtcattgtctgccaaagaaagcattaatggcagggtgtaagtattctggagatacgctgacattcactttttcatcaagacgctggtacaataagtcttttagaaatcgattgcctcttaaaaaattatcatcagatgaagttgcacagttggacacatttcaaagtgcaacaatacaattcttacttgatgtatatgtgctatttcatctcaaacccttgtttcattaaattaaagagcatggctgaccggctggggcacagtggagaaattgattagttcagccttcagatcttccttatattcaaagactttcattaagcaagtgtgtttcagagttgaattctgcttttgtaactccgcactctttgatttttaattcatcatagatttcataatgttaagttatcgtgtacattagatctgttctcagatttgtgtttggaaagagattgtgattttcagggccttttattaataatgtaattgggcctttaaaaatgcagattttactatgatttacaaagttggtagcctactttatgttgggtttgtgcctttgtttttgtgtgtttctcagtggctagtgccttattcaggcacttgtaacttcttgatagtaaatgggctagaagatctgtggctaacatctatcgtcatttaagtgaattatgcaaataaacttggcctaggcggtttaatctttttttttttttttaatttactctgaagggcacttttttttggataacagatattatggaagagtaagaggagactgagctttttcttaaacccataaactcaaaggatttaataacctcattgactcttttacaagggaacaccacctcagtgtgatgctatatgctggtgctgggtttattggaggagctaaaagaggtgtgtaattcttctgggttcctgtaggttatgtggcgggatgacctcttctttatcatgtagggagaaggggtgaagtgggtcagaagcaccatggtgtgagaatagttttctaatgagtttctatacagagtgaggcatttgtggctatatactgtctgtccgtgagcctgtatgcattaataatatgctgtgtataattggcttagcaatttgaaaaacgtgaaaagctgagagacaccatgttcttcatagtagggtactgagcctcctgaaatttagttgatattggaaatgctgacagacccttaactagagtgctgtgcaaagtagtgctataattcagtttaaagtggacttacatttgaaaaacatccttctgaatgtcacacattaataataagttctgaggaggcatttggtgcagctagtaatcataattcttattaaaactggtgacgtctggcccccagggtgtagccaagctcaaattgatgctttttgccgcctgatcaccagcatggcctaagtgctcattatattgtagagagggcctttggagctctcattagatttgacaggaattctctctagggggaaactgggcattagcgagactcctgacaggctgaaattattcctgctttatggcttataaccaaatgctagcaaggcatcatcaggggacacaaaaaattgtcatttttgacaacatctttgttactaaaaaaaaaaaaaaaatgcagtgatggggaaactttccgtacagagagctttaatgctgttaagatttgtctccagtgtgacgaccgctctcccttcccacctttcaacgggtttgtcggagtgagttctagagatttcagtgtcaaatctcactgctgactttcctgtctggaagttttaaagtgaaagtgcatccaaatcaagaatggtataattgtggtttcctttcctggtgtggtgcccacagcccgtgtttaggttgtgtcaacacttcctgataagccttgcctttactttctctgctcccgtttgtggcgggttaccgaaaaggcaatgaaacaggaatggtaatagatacttaagtctttcatggtagcactaagaatatttttttcttggagccctttatagatccctgtctgcccatctttatctgtgtggatggtaaactctagatatctctatacagtagaggtagacaatgtctcatggaaaattgaggcagttctgataccatcagagtgttagggtgcattaaaaaacagcaagttgatgtgagcctggtggtttgcctagctgtgcctagtgtgtgtggtggcgtgatctttaaatgtttttgtctgtcatatggtttgatattacctcatttgatatttttgggaacaagatgtactgtaaatgcacacataaaccttattttagcccactcatgttatcttttcagcatgctgatgaagccatgctataaattgtcattggtggctttaatttgcacagtaatgaacagttttcaatgtgatttgtcttctgtgacctccataggcatcctccagagtagattgggtaggtgttttgctctgcctacagctgtgtgcacgtgttcagagtctgggacttgctcaaggccacgcatctattgaagcttgagttgggttgcctcctccagggttgtctgtgctgctgctgctgctttttttttttttttgagatggaatctcgctttgttccccaggctggagtgcagtggtcgatctctgcttactgcagcctttgcctcctgggttcaagcaattctcctgcctcagcctccggagtagctgggattacaggtgtccgccaccatgcccggctaactttttttttcttttttttgtagtagagagagggtttcacccatgttcgcaggctggtttcgaactcctgacctcaagtgatccacccaccttggcctcccaaagtgctaggattacaggcatgagctaccacacccggcctgtctgtgcttcttcctatcccctcatgctgccatcaggaagatgaggtggaccatgtctccctagtgcctgcctcttcagttctgactctttgtgctgatgaacttcatgatttgtaagacatgtcaggactgaatgtatgttctaaaagttaggagaatcagcagtgccgctgactggtctttctggggagaggagggtcacaggccatgggtagataaaactactgagcagtactgtcctcaggttaaagtatgtttaagaagaaacaagtcaggaatcctggtggagacccagtgatggggagggagtttgatcagtcactttgtgcctgtgttctgctgaagaatgggcagagtgagagcactgggctctccaggatggtgaagaattttttttcttttttttttttgcgcgacggaatctcgttccgtcacccaggctggagtgtggtggcacagtctcggctcactgcaacctccgcctcccaggttcaagcgattctcctgcctcagcctcctcagtagttgggattacaggagtccaccaccatgcctggctaattttttatttttagtagagatggggtttcactatattggctaggctggtctcgaactcctgacctcaagtgattccccccgcctcggcttcgcaaagtgctgggattacaggcataaaccactgtgcccggccgatggtgaagcatttaaaaataaatgaaaagactagctctgaaaatctgaaaggaaggatgatatattctgcaatcctggttgggaaagggaaagagctccatgtgatatttcagcaagcaacatctcaggccatgtaaattttggagtgaaactgcttttacagttttgatgtgtgctttaaaatttctcttagaaaaatgcgttgttctttagtgggtttttaaaaaagtatttagatgggactgttagggactcacctgtgggatatttccttagatgtgattcttttactcttttgcaaattttaccttagtgttttttttgttttttttttttaaccctgtgtgtttttgtctacagtttctcactttgagattttttttccccctaagtcaacatctcacacagggaaatgactagctagagtataggcacttagagttaagctccagcaggtgttaataatcttgtcatacaaagagggtagctgtcatcaagattggagtggtcctcaacttcattagccaggcctgttctttgcaagcataagttaaaagagagaaagctctctgcatttagagcctagattccgaggtgcaagattagcctttgtttcttatcagcaagcaggactgatctctcacctctcagtcaccttccccacccttcagcagtgggccagtggctggtttttgtcctggacttgcactggagtaaggcaagggagtccctgggcatggattttaagaaaatcacaaaacatagttatcatgatcaatattttgaaaattcaaacggaatgcccccaaaatcttcaaggaacaacatgtccaaattttgtattagggcaggatccaacagggggagttgggaatagggtgaggacaggaggtagagtcaggccattgcagggccacagcacctcccttgcctccccctctttctgcctttggttacctgtcctgtggggagtggccatgaactataggctctgacttggttccgttgtagttcattgaagtcatttaattggggatttccattcgggactgggcaagtcatgaacacgttccctggcttcagttcccctctctgtataatgagggttagactagacaaaagtctgtttgttccctcgcatggtgggagccatcccagcatacacccgcagaacccagcacctcgtgcgtgcaaattgaggagcgtccttcgccagaggacttaagatgttctcccaaatagtgtttattaagaaacagaaagaaaatctgtttctttagtaaatatttaaataaatcatcttgagtggtagttaaactaaaaatatattcagttactggctcatggaaccattttaagtttccatggatctgagtctttgctgttttattattaaaccttttgtggtctccagaagtggattaaaggggaggaaactgagaaacttactggctttcctcaaagctttgattgatttcgtttcctaccctctcccctccccattgcttattgttgcctctgatttttaaaaatggaaattctcacaactagtacctttactacagggtatttagtatagtggtttttaagtaaattttagacagctgtttctgtcggtgggcttatttgacaagaataggcatctgtaccttcaaaatactcctcaccagaggattgttctgtgaatacggtgtgatgttttaagtggaactaggatgcgcaggtgtgggcaggaggagagaggttttctgattttttttccccgtgaggtgtggtttgatctgaaaagtgaaataaatttgcactgaaattttaacataaattaagatattcatgtattgccattcacctgatttaacaaaagtatggtttctaaaattgtttgcaaaggaatgatttcagatttgctgcttgtgtttcttcctgagcagggtccacaggggaaaaaaaaagaaaaaaaagtgaagaaaaatttttaaaattattgtttgtagactacccagtcaccgtaatattttttaatgaaaatccaggaagtgttgatatatgattttatcaaataacctgtgatttagcaaaattacatgtttcattatttaacatttaatttttttaatggcgatagagtcttaatctgttacccagactggagtatagtagcgcaatcttggttcactgcagcctccgcctcctgggttcaggtgattctcctgcctcagcctctggaatagctgggattacaggcgtgcatcaccacgcctggttaattttttttaaattattttttggtagagatggggtttctgcatgttgtccaggctggtctcaaactcctagcctcaggtgatccaccttcctcagcctcccaaagtgttggcattacaggtgtgagacactggtcccagcccctaattttttttttctttgagatggagtcttgctctgtcatccaggctggagtgcagtggctcgatctcggctcactgcaacctctacctccctgagtagccgggattacaggtatgtaggttcaagcagttcccctgcctcagccttccaagtatccgggattacaggcacgtgccaccacactcagctattttttgtgtttttagtatagacggagttttgccatgttggccaggctggtattgaacttgtggtttcaagtgagccacgtgcctcagcctcccaaagtgctggaattaacaggcgtgagccactgctcccagcccctaaatttttaataattactaagttgcaagccaggcatgtggctcatgcctataatcccagctccagaggatcacttgagcccaggagttagagaccagcctggccaacatagcgagaccctatctctacaataaaagatttaaaaaaaattaattgggcctggtggtacagacctgtagtactagctagtactagtgctgagtgaggcaggaggatcttttgatcccaggagtggggaggttatagtgagctgtgatcacacctctgtactctagactgtatgacacaagcaagaccttgtctcagaacacacaaacaataaattgtattctatttaccttctttgaagcaatataaaaatcataatggtgggcacaattgtttatcccctcccctgtaaggtctcatagtaggtataaaaaacagctatttattttagtttttcttatagtagtatttgctgcttagtcattctttgaccacaaaatatgttagcagaaaaagagtaggatacaagtcactttgggtagaaggaaaaagctgggaggaaaaaacaaattctgaaaattctatccgttgaattaactttttcatcttccaaatagagaaaaaattaagtatgctagatatacaccactgtacgctggaagggatagagttgtatatgtagcttgctgatcatccctgaaatctattcccagtgtactaatggatattcattatccattagatgaagtggaatcagtctttgagaatgtaggtgtgtttgaacttgcgcgtccaaatcttgcagtttgtcaaactactgaaatacatgtaccatgagactgggtttggtattagcaccatgactgatctaagtaggttactagtctatgatactagtctaggtatacgtacaacctcttggtgaaaagcttgagtgcgtttacctgagttgtttacttttttttttttttttttttgagatggagtctcgctctgttacccaggctggggtgcagtggcatgatctcagctcactgcaagctccgcctcccgggttcacaccattttcctgcctcagcctgctgagtagctggaattacaggcgtctgccacgatgcccggctaatttttcgtatttttagtagagacaggatttcatcatgttagccaggatggtctcgatctcctgacctcatgatctgcccacctcagcctcccaaagtgctgggattacaggtgtgagccactgcgcccggcctgagttgtttacttttaaatttgtaaggtcttttttttgggggggggaagacgagtctcgttctgtctcccaggctggagtgcagtggcacaatctcagctcactgcaacctctgcctctggggttcaagctattctcctgcctcagtcccacgagtagctgggactacaggcacgtgccaccacggacccagctaattgttacattttggtagagacggggtttctccatgttgtccaggctggtcttgaactcctggcctcaagtgatccgtccattttggcctcccaaagtgttgggattataggcgtgagccaccatgcccggccaaatttgtaagttacatacatacattgttgtattacactgttgtatacatttaaaataaatgaacattttaaacagtggtaaaatgaaatgtcagcacacattccattgacttgcccagtgtccccactgctcagagactgctagcccatatgtcaaacctggccgcaccctgggaactccagccctggaaagggagcatctttaagatagcagatgtaaattgtcttcagggtcttgggattacatccatcctatcctgcatgtgtgttcttttaaattttgacttccccctgtgatgacctctttgtccctcatagcctgctgtgtctacccctgagtactttcccttcctgtcttggccactgcttctttctcttcctgcatttccttttatcctgccaaataggcctcttcttgctgaaagtatgttttgagttttcctgttttctttataaaaagtccaggcttttgtatcaaccttcagatggccttcctcagtctccttcaagtcccagttcaaacaccaccacctgtttacttcaaggcggcctgggactacccagtggcaggctgtcacagcacttgttttgctcagtgtcctgtaataatggtttttcatgtgcttctttccttgctccgactaggttgcagtctgcttgaagctgagttagggacttccatctacccttcccgatgagttatccagagtaggcattgattatattgtgttttgggtactccttatgtgtagtggtagttgtatccattttggaccctgaacgtttgaaaatcaggtgaaagctactttgcaagaaaagtttgtacatgtttttacacacaaatacccaggatagctttgcccaacgattttggctgtttgtgtgcatctcaagatccttcaacaagtccatggaattcagattaaaaactcgaatcaagaaaactagtgtgggtcggcctggtgtggtggctcacgcccgtaatcccagcactttgggaggctgaggcgggcggatcacgaggtcaggagatcgagaccatcctggccaacatggtgaaaccccgtctctgctgaaaatacgaaaattagctgggcgtggtggcaggcacctgtcatcccagctactcgggaggctgaggcaggaaaatcacttgaaccagggggttggaggttgtggtgagctgagatcatgccactgcactccagcctggcgacagagcgagactccgtctcaaaaaaaaaaacaaaaaaaaactagtgtgagtccttatgctaaaattaaaaatgaaatcttttcagttctaataaccttatctaaccagttttgctcagtttttcttttggaagagtgatctgtagtcagtaaccactgagagttcttagtgaggagttttattgtagtaatatgtttgggtttggactaaaaaagagagataaacaaaactagcatgttgctggggcctaggtttggtgtgaattgagcatgtgcaggcattactgtccctggaactgcagctgccaatagagtgtagatgaattgcatgacaagcttctctcaaggcattaaacttgacttgtcaccagatttcttagtaataatgagtataaccactgattatttacttagtctttacatagtgtcttccattctcccaaacattttattatgaaaaatttcaaattacagaataaaagagaaatacacagcaatacccatattatacccacctgtatgatacctggagtctataaattaacattttgtaatatctatctgtcatatatcttccataggctcctccttcccccaaaatcaagaaataaattaataatatggggaatttggaaggacttgatagaggatcaggcctttctttagctaccgaccttggcttagactgataacatgaagcagggatttccatgtactttttttaaaatttattttttgatttttttcagtagagatgaggtctcactatgttgtccaggatggtctcgaattcctggactcaagtgatcctcccacctcagcctcccaaagggctgggattacaggtgtgagccaccacacctggcgtccatgtacattttaagaattctgtcttcacctgtttttatagggttttcctcctagacttgccctttgtacttttggcgtggttgtattaggtgatccaccattacacggtttttaggtgatttctttctcaactgtcacttgagattttatttaacgcagaaaagctggactccccttacaaagtcctcctctctttgttctgacccctcaatgaaacttgacttatactttacctttaagatgtaaccagtatatttgctgggggaaatattgttagcaacgataggtaagaaaatagaaataattttgcaaaaggactctgattttgaactttgtgtgtatggaattgtcgtgatggagattttcagttggcctcagggaccttgggtggtaagggggtaaggaccagaaacaaaacctcattgaggaccccagtgtgtggaaccaggcccttcaatgctgtggccttccggttgctcctcaggagcatagtctttgtttcctcttggtgccctcttgatgccttgagcaaacagctggtcagagcttcttataagtacagtggccagccagtgtattgacacgcacagacacaatagaaaactgcattagaaggcaagccattgggatttgcagtaaatgtattacagaacacaagtgacttgctgatactgcttgtttagcagtttgcaagggcaatggcagtatggatttttgaattagaagggaagggctgttctttctctgtgtgggaacatctagttgatggctggggagaaaattgatttagagaacaaaatgcagccaccgttatttgtgccatttgaaaggcctctatggattagtgagtgaaaataaaaaggttgctttcggtttaggaaagagggtcttaacattgatctgcgtcttggtctggtatggagagaataaaggatggaccaccagatggagaaagggcatccaggccccatgcagcctgcagatacaggtacacactccattctcacatagttgtctttctcagctctttggctttcagaagtcggctttttgggtttattattacagtaagcttttccaatgacaacattagagttgtcatagcccccatccgtggagctcccatgtgccctaggaattggtccgccagaagccgccccctccccgtgtcaaccttcccagcctccctttgtgtggatactaattattccaccttgaaaaagagaaaacaggtgagtgggattaggggatgacagtagcacctaccccatagggtaattaccaagattaagtgagttaccaaatgcaggagcagttgcgtagtttcctggcatgggggcgctctgagggatagctgtgatctaaatagcagtccctttaaaactctacccctgctcttggacttctaggccatgcttcactgatacttccgttttgtttttgcaaacccagcttccttcctacctctgaactgattttcccattaccgtgttttatttctttccttctaagatcataagcatttatctttaggcttaaaaggagaaaaaaaaaaaaggacttgttggcagtctgttttttttttttttttttttttaaatgaagtctcgctcttgtcccccaggctggagtgcaatggcgcaatcttggttcactgcaacctccacctcccaggttcaagcgattctgttgcctcagcctcccgagtagctgggattacaggcgtgcaccaccatgcccagctgatttttgtatttttagtagagtcgggatttcaccatgttggccaggctggtcacaaactcctgacctcaagtaatctgcctccctcagcctcccaaagtgctgggattacaggcgtgagccaccgcgtccggccttgttggcagtctttattgtctaagtaaaatgtcttactttggccaaacagcagaatgtgtccttggaaggcaatagctttaagtaatgtaactatcagtaagaataaagttgtgttgagttttttcatttaaagggatggaagaacaacaaaggatttggttcattctatcaaagtaagttttggcagaataaggactaggaggtatatttcagagtttttctttcgaatgtaacatggaaaatttgtcattttgaaaacaagcagggtatggaattagagggtcaagttgttgcttggttacagaaagaaaaaatttcattttgatgagggatatgtacacctgtggggagtgtgtgcatgtagttttctttttgctctgtaaagtactgtgcaaaagttgtgagtagagtagttgtggtgctgtctttcttcgtctactccatgggcttgagatttttgttgacagtcaaggttcacagctgctgctgatgtactaatatttggggaagcaaaaaaaaaaaaaattgttgggaggctgaggcgggacaatcacttgaacctgggaggcggaggttgcagtgagccaagatcgcaccatcacactccagcctgggcaaaaagagtgaaactccatctcaaataataataataataataataataatttattgcaggggagaaaggcagagccattgggattggtcaaactggaagtttaggctgtttactcttaatcccaagcacaatgcagtagaaacttcttgtgtgtctttgtaagtatttgagataaagcagggcacagttcagacaagttgtgccagtacctgctctcaaacaagctccaaagttggccgccttctgatctgggtgtgctgagaagctccgcgttcatggctctttctgcttagcttgagaagtggccctgacaccctgaggatctgtaggggaagcactaggttcttgacaaccccctagcctgccagttggcctgggtcccagaactttttccatttgtaagtgggctggctcatttacagtgcttgggccatgagctccctcagagccaatgtctctgcacagctactgaggagattggaattggaccattgaaatgtatccaacttctgtactttttagctgaccaaaggccaaaatcataccactaacttaggaggggaactgctgacatttgaatcttataagaaatctgtattttataatcgactaccctagatgctatgatatttatgaattaaatggaagtataaggaggaagtataaggaggtttcaaatactgactggatttttctgagtatatagattttttttcttttttttttttgagacggagtctcactctgtcgcccaggttggagtgtagtggcgcaatcttggctcactgcaagcttcgcctcccgggttcaagcgattctcctgccttggcctctcgagtagctgggattacaggcacatgccaccacgccctgctaatttttgtatttttagtagaggtggggtttcaccatgttggtcaggctggtcttgaactcctgaccttgtgatccgcccaccttggcctcccaaagtgctaggattacaggtatgagccaccatgcccggccttcatttttcttaaatagagacagggtttcgccatgttgcccaggctggtcttgaactccagggctcaagcaatccgcccgcttcagccttccaaagtgctgggattacaggcatttgctaccatacccagcctaagaatacattagttttgaactggttgttaaatctgtattcatccttgtttcttttttgttttgagacagagtctcactctgttgcccaggctgcagtgcagtggcgtgatctcagttcaccgcagtcattgcctcccaggttcaagctattctcctgtctcagcctcccaagtagctgggattacaggtgctcaccaccatgcctagctaattttggatttttagtagagatggggttttgccatgttggtcaggctggtctcgaactcctgacctcaggtgatccatctgcctcggcctcccaaagtgctgggattaacagcatgagccacggcacccagcccatccttatttcttgactaatttattaagtatggcttacctaccgaaagggtcccagacagatcaatgtcagtgtatcactgatcttatgcagccattgtttgggttattattttatccaagatcaaatacccaaaaaaagctgtgattttttttttttaatttttttttttctgattagcttctggaactctcaaagtgctgaaattgctcaaagttaataaggaataagtaacaattgttgcttctcaaagcaatataaaaggtggccatgcctgcaatcccagcactttgggaggctgaggtgggcagatcacaaggtgtcaggagggtcaggagttcgagaccagtctggccaatatggtgaaaccccgtctctactaaaaatacaaaaataagctgggcacagtggcgcacgcctgtagtcccagctactagggaggctgaggcagaagaatcacttgagcccgggaggcggaggttgcagtgagccaagattgccccactgcactccagcctgggcgacagacccagactctgtctcaaaaaaaaaagggaagggacttttgtgtagactttgcattgtgagaatattggtattgacaccatttataatttggagtagagtttgaagaccagattctactgtttgtcgcatactggttaatatggctgtaaagaggagatgaatgtggctacttttccaagtctattactcaggaggactgtaaatttgattggctgttacaattctagcagaatcattcgatttgagagcaatagaaagataagatatccaattacccaaatgatttgcagggttggccaacgttgtcatggagacacgagttggaacaaattaaattttaagcaataaaataatcttaaagcccgtctgggaacaagaaaatttggcagtggcacttacctgaattgaatcttagcttgacacgatgttgtttgacattgatatactgtgggggcctaaacttatatgtggtacaacattatctttaaaaagtcgctcggccaaaccagcaaagggggaccgttggtataaagtcagggttattaacatttatttattctatggcttaaatgatgattagactctgggttcccaagaatattttgtatctaaggattgaaatgcctaaataatgattaagcagctttaattggacacttggggaaaaaaagatttatttagcagcaatgcgcagtttttggaactgcccttcctctttgtgtgcatgtcttttggtgtggggggggagggtggaggtgtaagcatgcatatatttgcatgtacaagtgaggagattttggcacatgcccctacactgcagatgattctctgtattagttaaaatttctactttacagtactgcttgcagactggaaaattgcgttccagacttcagctgatgatctaaaacctgaataagcattagtctgtggcttagaaggttatttcccctcattaatatattgtttaactggttcctggcttgtgccacggatttgaaaacagccgagtggcccagaaggagggagggctttttatccacatgtctattagacagatggagatgaaaattggtctgaggtcaagccatttgcagcgttctcacagccttcgattttcctctcatcctcaccacagatcatctcaaatgattcagtaatgaccaaaagtgcaacattgacctttattccctggtggattactgtgtttcacagtccaaatggcaggaagtcttttctgttcttccagaaggagtgcagcattattgagccaacccagccctgtgggaaccacacaaatgcagaccagtgtaacagaatacgtgggttaaatttggtttctggtgctgtgggaaacgagaattgacatgtcctggaacccacataattaatggaagactatctaggatgttttctaaaaacacacaggagcatataaattgatttgtccacttgtaaaataacttgtgaattacaggagtggtaacttctggtggcccctggtttataaattgttcttgtttccattatcttcagttcctctctccttatttaatgcttccctagtatatcttagacaatactgtaaggctttataattttaaaattataaattgacatgactgagcataaagggatgaaggccttttttttggcatacttttaattatgtgtatttttggtcagtccctgtaactctgaatagattctgtcccatacgacactttttttcccatcctgaaagtaggttgattgttatcttggaggaatggtgattatttttctcttacttagattcctctgtggattgtataatgatgcagtgattggggttttttttggtaaagaagtaatttgtatttaaaatgttattcctgtttgcctccacatgcatgggtgagtcaatattctgtgaatccatacaccatggcacctgtcatctaggatccttttgcttactctcttctaaatacttaaaataatcttttccaaaggttatgctttgaaaaatttagctagcatcccagatttcattttaatcgtgactaaaatgcttttgagaaaataaaacttcttgactgttaactgttcacaggttctttttctgcctcagtggctccaaattttaatccctacccttgcccaccacaacttccaacttcctttacatatccttctttttttttttttcgagatgcagtcttgttctgtcgcccaggctgctggagtgcagtggcgcgatctcggctcatcgcgacctccgtctcctgggttcaagcaattcttatgcctcagcctcctgatgtagctgggattataggcatgtgccaccacgcccggctaatttttgtaattttaatagagacagggtttcaccatgttggccaggctgatctcgaactcttggcctcaggcaatccaccctcctcagcctcccaaaatgctggggttacaggtgtgagccatcacgcccgggtctgagtatccttctggctactttgagagtgagttgcggaacattgcaggttttttggcatgtgatattgattaaaaacataattccaggttccatccgggaaggcagcaaccttatcttccttcccaaaggaccacctctccccagccactcagcttgggggggagcaggaatacagctcaagggctgggacttccccgctgaagtttcagcactgagtttgaggggccaggaatggctttgatacatatatcaaaattggagccattatgtggcactgggggcctagatctccttgtagagagctgttttccctaagaagttgctcaggaaggagagtggcagctgttactcatgtatgtgggtcattcagctgtagcatggcccatgtgcagaaagttccttttctaccatctagattggctgaagatttaaatgtgttagggaaacattcagaggtaacttgatttttgcttcttttttttttttttttttttgagacagtctgtctctgtctcccaggctggagtgatctctcggctcactgcaacttctgccacccgggtttaagcgattcttgtacctcagccttctgagtagctggattacaggtgtgcaccactacacccagctaatttttgtatttctagccatgttggccaggctggtctcaaactcctgacctaaagtgatccacctgcctcggcctcccgaaatgctggaattgtaggtgtgagccaccgtgcccggctgatttttacatatttttatctcactctgttgcccaggctggagtgcagtggcttaatcaaaactccaaactccaaaccaaggattactccgaacaagtgatcctttgcctaagcatccccagtagctgggactataggccacaccaccacacccggctaatttttaaattttttctgtagaaatgaggtctcactatgttgcccaggctggtcttgaactcctgctctgcggtgatcctcttaccttgctctcaaaagtgctgatagatgtgagccagtgcttcaggcctttgtctttatttacacaggcatattttattttatttatttatttatttatttatttatttattttgtgagacgagtcttgctctgtcacccaggctggagtgcagtggcatgatcttggctcattgcaacctccgcttcccgggttcaagcgattctcctgcctcagccccctgagtagctgggattacaggcgtgcaccaccacgcctggctaatttttgtatttttagtagagactgcgtttcgtcatgttagtcaggctggtcttgaactcctgacctcataatccgcctgcctcggcctcccagaatgctgggattacaggtgtgagccaccgcgcctggctacacaggcatattttagtttcataattgtaattttaaccttcaaccagtgatgatgatgatgtagtctacttttcctcccactaatcctgccattgtgtggtattacctaatttcttatgagctctctaatgactaagatatgtgaagaggtttaaaggtataggcttgcttggggtgtggcccagggagaggcttgcttgctttccacaggagagtaggtgatgacttcacggtgatgatctgtgattcactctgcggagtttggagaaagatttctttctccaccacagagtgcattttcctttaagcccaccaaaagctgtcctttttccatcctgggacaagtcaataccatttcctgtgaacaggctctttctgaactccataacaagggtttctgaataatggaaatgtgctatttaggaactaaaacagctgtgatgcttttgtcaaagatgcatctttaccaaaatgacaaattaaagcccaaatgctctgcttggcaacagttgggtcaaaacatttaagtcattaattagacggaactgaagggggaaaaatttacacaaacagcattgcagactcaacttcatcttggaaaatgcaactgaattctttaaaaaaaaaaaaatgagggcagccctcaagtggggcctggcaagcttgtcatttgcaaataaatcaaaagaccatcattgcaggaaggagaaccaatgaatagagttgctttgtcattctttgatgggccccacactcaagcccgctattaaaaatgaatgcattcaagagcctctgcattaagaacataaacaattaagggcacttgagttgctctgctgagagctgctgcgaagataggagagctttctccggagatgcaggcccctgcaatctgcctcacgaggagctagagaatgggagcaattagtgttgctatctgtgcccaagcagccttcagcacggttttttttttccttcctttcttttaacccctccttgttttcagagaactgcgagtgtgaaagatgaggagtgaaaggatagtatctgggcccagttggagagagctcagatttagaatgctgcaggagctgccaagtgaggagatggaacataaaagttattatctgccagtaattggtgacttgtgttctgattagttgagccactaaagggtttctgtcatctggtactctttgttttgttttaatcacaggcttgaagaaggggcgagattacattgccatgggtggaataacttaaatgaatattgtgcgaggttttccacagaaggcaaatgtgttcctacacccccggtttgtgttcttgcctcagtgttttgtaaaaatgtgtgagagggcagctctcatgttgctgcagggctctggagagagacaggcctgacctctcctctccactgtcttgttctgatcttaggcaagttattttagtctgttctcccaggggacctggtgtccacatgaagattagagagagggtgtcagagcacctggcaggtgctaagcagtagatgctgctgaaatagatggcagtgcttctcaaagcatgttccccagtccaagagcctcagggtcacctgggaacttgttagaaacgaatattctcaggcctagactccaacaggaactccgcaggtgggcctagtcatctgtgtattaacaagcacaagaccatcctcgtgtacgctggagtttgagaaccactgataacctcactaaccattataaggtcaacttaaaggtacctcacttatttttttttttcttaattaaaagagagattgagtttccctatgttgcccaggctggtttcaaactcctgggctcaaggtatcctcctgcctcagccccgcaaaagtgctgggattgtaggcgtgagccactgtgcccgacctccccacattttttaaatttggatttccccaaaatgtgattagttattttatcggcataattatattttaaacaaaagctactcagacacattagatttaaagatgaatttaccttttcatgagctattggtgagcaaggcactgtgatgggagaaatcttaagactctgagtagcagatatcctgaaggaggcctcttggcaaagaactcttcctttcctatgaagggaaagagagtattggaagattatttgcagtgttttgtgtgtatcatttttggtacacagtttttattcatgtatccctaattaagttttttttttttttggtagaggcagtgtcttgctgtgttgcccaggctggtctcgaactcctggcctcaagtgatccatcccgcccaaaatggtgggattataggcatgagccaccatgcctggctcctaactttctttaggtataaaaataagacgtcatcttcaggaactagagatgtgtttgtggattttgttctactggtgggccagatggtctgatgttagggttgatgcatcattctttctgcctgtgaaggagaatattaaagtggagtttggctgcaactcatttacttaaggtttgcaatttataattgaggtcccttataaaatgtctattctggccaggtgtggtggctcacacctgtaatcccagcactttgggaggctgaggtgggcggatcacgaggtcagaagatcgagaccatcctgccgacatggtgaaaccccgtctctactaaaaatacaaaaattagccgggcgtggtggcaggtgcctgtagtcccagctactcgggaggctgaggcaggcgtgagaatggcgtgaacccgggaggcagagcttgcagtgagccgagattgcgccactgcactccagcctgggtgacagagcgagactccatctcaaaaaaaaaaaaaaaaaagtctattctgtgcggatacctctgctagggtagcaagggcacggtgaccctgtcattgacagatgagaggcactttctgtagtccctttgttggctgagggatcatgcggacttgtccttgtgctgctgcagccctgtttgggctgtatggcctttcagcagctgcgttgctttgcaggcagggccgagttcatcagctctttcttgttttatctcccaattctcaacttctgctttctggagaaagaactagacagggaatatgtggcttcttgctctatgatcttggacaaatcatttcctttagacctctgtttttctacctgtgatttgaggatcgtaagagggctgggtacccaaatagttccaggtttgccagcattgttgtgtctcagcaccactgttgatcgcaaacgtggtgagcctgacggcgcttatctcccttcctgatgaaatattaaatttaaacagtaaattggtcaggtgcaatggcttgtgcctgtaatcccagcactttggggggccgaggcgtgtggataatttgaggtaaggagttcgagaccagccttgccaatatggtgaaaccccatctactaaaaatgcaaaaattagctgcacgtggtggtgcacacctgtagtcccagccactcgggaggctgaggcatgagaatcgcttaagcccaggaagcagaggttgcagtgagctgagatcatgccactgcactccagcctgggcaacagggtgagaccctgtctcaaaacaacaacaacaaaaacatttaaacagtaaatcaagggcaatgattccaagtcactggagggaagaaaaaaaggtcactaaaagccctaccacctcagcataattactcttaattttggatatcaatttacggtgcttggccactttgctaattttttttttttgatacggagtttcacttttgttgcccaggctggagtgcaatggtgcgatcttggctcactgcaacctctgcctcatgggttcaagctattctaccacctcagctcctcaagtagctgggattacaggcatgcatcaccatgccctgctaattttttttgtatttttagtagagacagggttcaccatgttggccaggatggtctcgaactcctgacctcaggtgatccacccacctcggcccccgcaaagtgttgggattacaggcgtgagccacagctcctggccctttaaacacacacacacacacacacacacacacacacacacacacacacaaaacaggcacactaatactaacaccgtgtctcctgcatcatctagtgaatgtcttggtcattttagcatcattatcaaagtatgactttaatggctacttgccatgcctgtgggttggtgtgtagcgtatttaactgttctcttagttttagacaactgatttattaggagggcaaatgttaactttctcaaaaactcggtagatggttgtgatgtgttgaattgctgttacatctttacctgtttttttctcttttcgctttgaaactagtgctgcagtgaacagcttcatgcatggaatgcttttcatttgaactatttccttaggataaattcttagctgtgggaagccttaccaacgggtttgaataatttcatgctcttgaaacacattgcccagttgccttccaagacagcgctaccaatttaatgtcatcagtaacgtatgattgttccactttccctgaggatgcttcatcattggattttgttaattttttaaaaattgccttaacttcctgaatgacctaccttacttacaacaaaatttacatttttgtttggttgccggtgaggtttctgtgtacattttttttgggggggggatttaaggttgtcatttcacagactcagaaacttctagtcagaagggatttagaggttatctgtttatttcctttgtgtgctttgttttcatgttcttgcccatgtatctgttgccagacacttcttaccaacactccactgtgtttttatcttggcttcccgcttggttcaaagaaaccagaagatcagtttgccagccctcagcataagcaccatttttttatgatccatcaatttgcaatttaatgctggtggagtttcccctccctaagctgactttgggcaaggtgccattggattgctttgaggcccatgggcaattactcttaagcagtcctcaccctgttttgagcttcaaacagcactcattatgcactactgtatgtgtagtggggaagtgtgcgggcgctgaggagtgggctcttccgtattgcagttagacaaagtatgagaagtaggaaaggtggttttaggaattatagaaccctaaactcttaagttcagctactcagaagaccatatcttgaaaaaaagatatatatatatataaaaatacatatatatataaaaatacatatatataaatatatatgtattttttatttttatttatttttatttatttttatttttgagaccgagtctcactctgccaggctggagtgcagtggcgccatctcagctcactgcaacctctgcctcccaggttcaagcaattctgcctcaggcttctgagtagctggaactacaggcacgtgccaccacgccaggctaaatgtgtgtgtgtgtgtgtgtgtgtgtgtgtgtgtgtgtgtgtgtgtttagtagggatggggtttcaccgtgttagccagaatggtcttgacctcctgacctcgtgatcctcccgcctcggcctcccaaagtgctgggattacaggcgtgagccaccacgcccggccatatcttgaatttaaaagtcgcagaatacactagagtttgattgattgctgatctctgaggtccttggccgtatttctgctcagttaaaacatacatgtagctgggcatggtggctcatgcctgtaatcccagcactttgggaggctgagaccggcgaatcacgaggtcaggagttggagaccatcctggctaacacagtgaaaccccgtctctactaaaaatacaaaaaaaaattagccgggtgtggtagcaggcacctgtagtcccagctactcaggaggctgaggcaggagaatggcatgaacccaggaggcatagcttgcagtgagccgagatcgcgccactgctctccagcttgggcgacagaacgagactctgtctcaaaaaataataataataaaataaaaaaataaaaccatacatgtacatgaattttatacttaccaacgtatgattttgtttttttttttttgtgaacagcctttgtctagcactgtttagtaatggtttatctggttgcaccttggccattgaatttaggggtgcatggagattaagttttggttcattgaggcatgactttgaaagtatattaaatatgtaccctggcatcagttttagtaggggaggtacggcaaagaaatgtgtcacagtatttagtaggagtcgtgttctcgtaatgcttcccatcttgttgtgttgagaaggcttttaggtagaaagctgttaagaaactgtatggaagctttctttgtatgacatggtgatttttaagcacataggtttagtttaccaaatgacagtaagtgctgtggaggatcttgaagggcctagagaagagtgcgtttattggcgttatgggggaaaggcagcttctcagtgaatttgaggcaggccttgagggattgggaagatctctcatatttgtacagcactttggaatagtataccttacataccagctcatcagctcactcgattttgatgaaactctcaagtagattggtggtaatcctgttaagtacgagacctggttgggacccagtggtttaagtgatttaacatagaacccctagcagtagtttgccaagatgcaaaccctaatttttggatgatgagggctaactgtattaccatatgcaaatcagtgaggagagttggcataggtaaggagaatgaaagactgttgtagacaggtaatttggactcctgcttcctcctgcctcagtaggtggtggccatccatgaagaaagtcttgttgctggagccttcatcctgctgcttacatttctgagtggagggtttcatgcagatttggtttgtggatagctcttgaatgcagatttattgttgttgccttacacagtattaaaaaatctaggcacagggaaagtttataagcattatgacttagtgggtaccaaataggtattcatcattgggtaggaaaattatttctaggtgggaaatacagttagccctcagtttttcactggagttgtctagcctttgcaagaggtggaaggcagcagggtcaaatacccaggttaacctgccagcacactccaatcaagaatagaagcatgggcaggagtcactacgagaggccaggcgcggtggctcacgcctgtaatcccaccactttgggaggctgaggtgggcggatcacgaggatcaggagatcgagaccatcctggccaacatggtgaaaccccatctctactaaaaatagaaaaattagccaggtgtggtggcgcgtgcctgtcatcccagctactcgcgaggctgaggaaggagaattgctttaaccagggagtcggaggttgcagtgagctaagatggctccactgtactccagcctggtgacagagcaagactccatctaaaaaaaaaataaataaatagataaataaatacataaataaaataaagtcactacgagacttgttaatttgtgctaaattaagaatcttaccagaatacccttttgttgaagcaagagataatactaagaattattgccagtttgtatgctgctgcaatccagactatttgaagggaagatgttcatgaagtcctcttggagagctagtgatgttttaggactcacagagcattgttgggtaagctgtgtaccctcacctgccaggaggtaggttgtgcaggtgaaggagccagggtatttcagaggacgtcagcgccttttctggggtaaaccagcttgttaatagaacagtccaagacttggatttagattttctggctcaaaagtcaagctggcttgtcagtatagtttaagattagggtttagagacctggcagacggaggggaagtcttgggtaagactctcctctattgctcctatttgcttcttctccagaccatttatgtagaatttccaggacatatggtatggctttcgatgtttttcatcagtttgagctttgatttctaacttttctcctcctgtttcaggcttatccagtctaacccaacttacatagtacagtcggccctttgtatctgtgggttctgcatctgtgaattcagctaaccatggtttgaaaatacttttttttaaaaaacattgcatcggccaggcacagtggctcatgctaggattataaatcctagcactttgggaggctgaggcaggtggatcacttgaggtcaggagtttaaaatcagcctgttctacatggtgaaaccccgtctttactaaaaatacaaaaaattagccgggcatggtggcacgtgcctgtaatcccagctacttgggaggctgaggcaggagagttccttagaacccgggaggtggaggttgcagtgagccaagactgtgccactgcactccagcctaggtgacagagcgagactctgtcttaaaaaaaaaaaaaaaaaaaaaaattatgtctgtagtgaacatgtacagacttttttcttgtcattatttcctaaataatacaacaaccatttacctaggatttacattgtattaggtattttaagtaatctggagatgatttaaagtgtatgggtagatgtgcataggttatatgcaaatacaccattttatataaaggacttgagcatccttagattttggtttccatgggggattctgaaccaatccctcacagataccgagagaccactgtattcattgcctttgctttcatatgtctttcttttctttattttatttttgataactttaatattattaaaggtttacaagttcatttcattcagactggatcttaactgtcctccgaccatgttcaagtctactttgatgccattctaggtagtaacacatagttgctatcatagttaaagatgagggcatcttttcttaaaccaaaataaatt

SEQ ID NO: 667 - protein, 407 aa, Homo sapiens
MTVRGDVLAPDPASPTTAAASPSVSVIPEGSPTAMEQPVFLMTTAAQAISGFFVWTALLITCHQIYMHLRCYSCPNEQRYIVRILFIVPIYAFDSWLSLLFFTNDQYYVYFGTVRDCYEALVIYNFLSLCYEYLGGESSIMSEIRGKPIESSCMYGTCCLWGKTYSIGFLRFCKQATLQFCVVKPLMAVSTVVLQAFGKYRDGDFDVTSGYLYVTIIYNISVSLALYALFLFYFATRELLSPYSPVLKFFMVKSVIFLSFWQGMLLAILEKCGAIPKIHSARVSVGEGTVAAGYQDFIICVEMFFAALALRHAFTYKVYADKRLDAQGRCAPMKSISSSLKETMNPHDIVQDAIHNFSPAYQQYTQQSTLEPGPTWRGGAHGLSRSHSLSGARDNEKTLLLSSDDEF

SEQ ID NO: 668 - DNA, 1224 bp, Homo sapiens
  source 1..1224: mol_type = genomic DNA
atgacagtgaggggggatgtgctggccccggatccagcgtcgcccacgaccgcagcagcctcgcccagcgtctccgtgatccccgagggcagccccactgccatggagcagcctgtgttcctgatgacaactgccgctcaggccatctctggcttcttcgtgtggacggccctgctcatcacatgccaccagatctacatgcacctgcgctgctacagctgccccaacgagcagcgctacatcgtgcgcatcctcttcatcgtgcccatctacgcctttgactcctggctcagcctcctcttcttcaccaacgaccagtactacgtgtacttcggcaccgtccgcgactgctatgaggccttggtcatctataatttcctgagcctgtgctatgagtacctaggaggagaaagttccatcatgtcggagatcagaggaaaacccattgagtccagctgtatgtatggcacctgctgcctctggggaaagacttattccatcggatttctgaggttctgcaaacaggccaccctgcagttctgtgtggtgaagccactcatggcggtcagcactgtggtcctccaggccttcggcaagtaccgggatggggactttgacgtcaccagtggctacctctacgtgaccatcatctacaacatctccgtcagcctggccctctacgccctcttcctcttctacttcgccacccgggagctgctcagcccctacagccccgtcctcaagttcttcatggtcaagtccgtcatctttctttccttctggcaaggcatgctcctggccatcctggagaagtgtggggccatccccaaaatccactcggcccgcgtgtcggtgggcgagggcaccgtggctgccggctaccaggacttcatcatctgtgtggagatgttctttgcagccctggccctgcggcacgccttcacctacaaggtctatgctgacaagaggctggacgcacaaggccgctgtgcccccatgaagagcatctccagcagcctcaaggagaccatgaacccgcacgacatcgtgcaggacgccatccacaacttctcacctgcctaccagcagtacacgcagcagtccaccctggagcctgggcccacctggcgtggtggcgcccacggcctctcccgctcccacagcctcagtggcgcccgcgacaacgagaagactctcctgctcagctctgatgatgaattctag

SEQ ID NO: 669 - DNA, 32706 bp, Homo sapiens
  source 1..32706: mol_type = genomic DNA
gcacatcaatgccagaacttaattgcattttatcttgttcagttaacctaggtgatgtctggaccggcaaacagaaatggactaggcggcttgaaccctatctgaagacttttgctagttcggcagcctagagccagacggggcaagaaagaatcgctgctaagcggagtgggaaaaaaaggcctctttcagtgctttgccatttcatctggcctaattgcacacaacactcggtccacgttcattccacaattccacacgcatccttcactcaacaaatagccattgtatttcgtttcatcttcaaaacaggctcaaatggaggaaattagggttaaaagaagtgaagcaccagcgagggtcaggggcagagatcgcagcccagaaagctctcgcggttgggggccggtcgtagctggttttgtgagtggcaagagaacccgggtcgcgccccaacccgcggggcggcgggctggggttcggggcggcgggctggggttcggggcgcggcccctttaaggcccaggcagtgatctcagccgcgtccgccgccccgccctccccggcggcgagcccagagcgcatgcgcgccgcggctgcactccactgggcccgggacgcgccggcggcggcggagactccggggctgcggcgccgcccgccccgcccgcagagtccggctgccgcgcatcgtccgcagacgccgccaccgccatgggctcctgaggtatcccgcctggccggcctcgcccgggagccccaagggggagctgcgactcccgagcgcggggggctgcttgtttcggagaggcccgcgcgagggacgcccggcttcggccgccggctcccgggcggggagggcactacggaggccggtgcggccgcggagggagggggcatccgtctccccacccgtgcctcctctccgccccgcgaggtcgcccgtgggtgtgcccgctccctttccacgccaacgtggcgggggcagctcctggagtgtaatcggacctgtccggggggcggccccgggagagggaggcggatggaccaaggcgctttgcaagagggattgtgtgctcccgggtgggtgtgctggcgactggcacggccgagtgagtgggggaggcgtccgtgccctgtgcgggtggcagtgacctgggagggtggtcggcggggggctttcggggctgcgtcgtgagtggagggtgtacacgcccgccacacaggtccgcaggtttggaaggggatcgactgggacctggggctcgaaagatgtttgcccccaaagggaccgtggagactggttttgggtgtctgtatccttcccgtgaattgtacatttcctcctgggcacacccttggtacctcgcttggatccacttacctccagtgctgggtggctccaggccaaggcaaggcagttatgctgggggttgggcatggattcccaatacatatcccctctggaggtgttgtataaggccagacgttttactcctccctcctttccagggcattttggggcaaagcaggtatttgcatgcctgatacctgtggtgaggtgaaggccatgtattatttatctgactgctggtgcttttgtaaggaaagaagcagcaatctgtgccctggaggccctgcgctgcagagtcagccaggcaaacaagctcacctgcacctgcagaggcagcgcaggtctcagaggtgtgacttcgttgacaggttatgcctacagtgtccctttccatctacctatttagcttccttggtagaacccctaggctctgcacctctgaaccttgcctagggtgctgtgcgtatcagagttgggacctgggacgctggggtgggagagccccagcagccaggtatgtgtgcccacctggacagaaacatttgatgcccaagccatcaaggagctctcaagcatgggggaatcagatttggaaacaggtgatcacgatgatgtgaaaaataccaaacaaaggagtagaaggagtacagaggcaggttcagttcccggggagggggatcgtggccgcaggaaagactccctcataaggagacggttgagctgaagcctgaaggatgactgacgttcatctgaggcttttctgctttccacatatattttcctgtgtaatttgcacagcagctgtgtgagtaaggaacagttgtccctatttgcagatgcggtaaactgaggcccagagggaattcatgacgttcttctccacgatacgtggcaagcctggatggaatcatcctttaaccaggacctctctcttgctgccagatcttgtcttgcaacttactgagcatctactatgtgccaggcactatgctggggcatagcggtctgatgatcaatgggacctggtgcctgccttctaggggctcccagtgctgggaagatggacactgatttagtgaccccaatctggatacgaggctccaatagctaatgtgggtggagaaggcgctgtgaattcccccaaagcatttgtgcagtcgttgggattctggatgtcttatttgttgcacccacggtggtggtgggttattcaaagagccccttctgaatttctccaaccaagtagaaagaagagcttcgaggcagaagggtgaatgagccacttgtcctagttctttcctattggccgagttctgtgagcaggggcttctgtccggaggctgtttgctccctctctgtcttagaggttttgctcctggtctctggctggcctgcccagtccctcaccctgagaagggctcagagctatttccagtccctgctgtgctcattttctctctgtaaattccctggagtggaaacagccccggcaaggcagggtacagctttttattgttttgaaaacgagtcacagctctgggcctttagactggggatctggtgtgggagttctggaaggccaatagctgggcccctgggagagctctgtgtggggtctgcaccaggccctgcagccccgggtagtaagcactcaccgaagaccatgctgccctgcactgtgctggggcagccctctaaaaggtggttggcagagggagcccaatgtgtaacaaatatgtgcaagacagtgccctacttgtggtggaaacagagggccctaaaggggcccagaggacaataggaacaacagtccgtttattgagcacttactgtgtgccaggcacagttcaaagcgctttcatgaattactgtatttaattttcctaccacccagtgtggtgggggctgtcactgtctgcattttgtaggggaggcagcagagagtggaacagctgagttttgaaccagtaggtctgacctcagagcccatgctcctcccccataaccctggggtgctggaagtcgtcttggccctgaaggacgaggggtgctccacctatgaaggagaaggagggcgttccaggtagagggaactccgggcagatgtggaggtctgagctgcctcacctctcagacgcagaggcttgaactgcctgtgactgtgttgggtctgtgtcctgaagacctttggaggccccgccaaggagtttgaacttgatcctgatgtcaacagggaggccttgaaagtttctggaaggatgtgacatgctcagccatgtgttatggggcagtattaccatcccttctcatccctccttcattcctgcagagaacttctggaagaccaggcctttgttccgttggctttcctacagcccctggcatcgcttttagaccccgccgcctttctcttgttgtcttctagcagcttttggtcttgaagaccctgtgtgactcagggcaggttctggagcccactgttgtaacggtgtctgccccactgctgaccccttgcctgctgggaactggcttctctgagctggaactttttttgttttttgagatggagtctcgctctgttgcccagcttggcatgcagtggtgctatcgtagcttgctgcagcttctacctcctgggcccaggagatccttccaccttggccttctaaagcgctgagattataggtgtgaaccaccatgcctggtcagctggaacttttttttcttttaagacagagtcttaggctgggcgtggtggctcatgcctgtaatccaagctttgggaggctgaggtgggcaggtcgcctgaggtcaggaatttgagaccagcctggccaacacagtgaaacccagtctctactaaaaaaaatttgccaggcatggtggcacacacctataatcccagctacttgggaggctaaggcaggagaattgctttaatccgggaggcggaggttacagtgagctgagatagtgccactacactccagtctggtgggtgatagaacaagactccgtcttaaaaagaaatggtcactaggagcacgggaggaggagggagagagggaggtaatgcgctgagcagttctggtgacccagagagagaattgggagatgcaatttaaatctgtgcgcttattagccctgtggccttgggcaagatgcttaccaggttctaattcctgctgtttaaaaatagggggcaaatgattcactttccttcatctgtaagatgggagtaataacagtgtggctgtcacgtggctggcctgaccaatgtctgatggagctcagcacggtacctggcacacaggacatgcttttattatgaccttacaggcccattcatttatttgagaaggaggcatcgcaggcctgtgtgccaggctgtttgcggggagccgccctcaggagccgagtgcagctggggagagagaaatcagacacacaagcaattatgattgtcctgggggctcttagggaaccttaggccattgtcgcctgggcgggcacttgtctagtgaggtgatgtgtattaaggtggaggaagaagtgggctccaggtagaaggaagagcacatgcaaagcagaggtctgagttcatgtctatggagttgtttgatactaagtctcagcacttagtagacctgaaataaatgtttgctgaatgccatctcctcagcctcagagaggacagaaacgggaagaggtagagtgggaggcggccacagagagaagaattgaagggtcacccaagttgtagattttctcatcattccctccccttggcctccgtctctgtggaaaagcaggtactaatgtggtgcaggtactaacagtgcgtctgagtctgccagaattctttcttttttttttttttttgagacagggtctccctctgttgcccaggctggagtgcagtggcaggatctcggctcactgcaacctccgcctcctgggtgattctcgtgcctcagcctcccaagtagcggggattacaggcacccaccatcatgcctggctaatttttgtatttttagtagagatggggtttcaccatgttagccaagctggtctcgaactcctgaccttgtgatctgcccgccttggcctcccaaagtgttgggattacaggtgtgagccactctgcccggcctccgccagcattcttaccgggcactcattcccaaattgcttgtcctcagcactggagaggataaatctaaatgcagaggtggctgacagctggaattaggcggacacccaggtagcatttgttcacgtgtctatttgctgctgttttagggtggctgaagccctatgcttgggtatggcatagaaggatggtgcgtggcttctggttggtgacttttctagtcttaggttaatcatggctcagtgtctggcgaaatgtacacagtaggtagtgaagtggtttttgaataaacaaatgaatggttggatgggtttgtggcactgccactcaggataaagctataattattcttgaaaaatgacggatatggctaggtgcggtggctcacacctgtaatcccagtactttgggaggccgaggtgggcagatcacttgagctcaggaattggagaccagcctggccaacatggtgaaaccccgtctctactaaaaatacaaaaatcagccaggtgtggtggcatgtgcctgtaaacccagctacttgggaggctgaggcaggagaattgcctgaacctgggaggcggaggttgcagtgagctgagactacgccattgcactccagcctgggtgacagcgaaactccatctcaaaaaaaaaaaaaaaaagatattaggggtggttggaacaggattggttattccaggagccggtggtgctcactaaacagccttgagtctggctggctggtgtgggaggtcttaggcctgtgatgggagacaggaagcttggtggacacctccttttccttctctggggtggaaaccacaggggaagatccacccagaaagcctttgtgctgaacctgcgtcacttccagctcaaccatgttttacaaagtcacatcccactaagtgaatatttggtgaaaagtttgccacgttgatctcagtcttgtacctttgaaaaacaataggcttctctgagattagaagtagtacttgttttttttttttttttgagacagagttttgctctgtcgcccaggcagacagtgcagtggtgcgatttcggctcactgcaagctccgcttcccgggttcaagccattctcctgcctcagcctcccgagtagctgggagtacaggcacctgccacggcgcccggctaattttttgtatttttagtagaggcaggatttcaccgtgttagccaggatggtctcgatcttctgacctcttgatccacccgcctcggcctcccaaagtgctgggattacaggcgtgagccaccgtacccggccgtacttgttgatagtaaacttgaagcacaggaaagattggggataagaataaaaattaccccaaatttccaaatcaagaagtaatcatggttcaggtttgggcagatgttctttctaggcatgaacacacgttatctcattgtttacttaacaccgggttataaacatttacccatagcatttgaaaggtagctatagatagaaaagaatcagagaagttctaaaacagctcttgcgctttgtttcaaattctctgcaggaaagatgaggtcttcagccttttttttagctggacggcaccgttgcagcagtggtgaacagggcactggattgagtcaggaaacccagctgtgaccttgggcaagccacttgccctctttgagcttcactcctgctaaggcaaggggcgctattcgtaccctgtctgcccacctcacaggctctggtgaagtccttgatttgaacgcctttagctcccaaggttgtggtttggagatagggcaggtcacatgaccatgaagactgaaggagaaacgtggaagcacgtgtgcctgttgcttcttttccaacttaaaatgcttggtgatctcctgaagactccagcctcctctctgggaagccaggatccacagaccctttacctgcgggtcatgggcagtcccagatggtccccctccccaacagagggggtgcagtgagacctccggaagttactgcctctgttaccctcaaagggattttcagatcagacagcccccctactccaagggacgtgtgtggagcttggtacctttatttatctcctgctccaacccctgtggactgcctgcacccagaatggggcctctcctgctggcaagtggctgagaacctccactccactcagcagggctgttccccatttaccgaaaagctccgagagaaaataactaaccccatggcgccgctgtagctactggcagagcctcctggtccccacctctagcgcctgtggtttttgtttcatgcagagtgagcagtgaatctgggatcccatcagcagtcagtttgggtgcctgcgaggcacaatgatagatgttggtgaagggtatgtgtgaggatattaattaatattaacatgctagttatattaatattctcattggaatttgtggggctttgcaagttatatttcaaatatatggttttatgtaatccttttaactgccctgaaaccttgaaattattgcacctattttatagatggagagactgaggctcagaggggtgaattgcctaagatcctgggggaggaagcacccaggttttctggttttgagtcctgggcccttcctgctgagtagctacccccaacacagacctgcccttggagagcttgcagccacactgggaaggccagtgtattggattgctgcttagacctggaaagcacgtgaataaagcttcaggttaaaaccatgggggttccaggaggcagcagtcggctctgcctgggggtgagctgaggagccggtgctctctggaacaagggtagttgggctgaggctcagtggacagtggaggttggcaggtgaagtgcaggaggtctttgcagggagtgggaccaccttgagcacacacagaggaatgagacaggcaggttactcaaggagcagaggtctcgtgaccacttcccagagcatgtggggtcctagcctcatctccaggaggagaaagtgcatctatacacagatttgtcaatggagtttaaataggatgtgggaaaatctagattttccaaaacagtacatatttgctttgagaagaaaggtagatgcaggatgcataggttagataattttaatagcagtaacctcagagcatgtaagtatgatttgatttactggagtgcctggccgtctcagtcagtgggagcacggcttgggctgggagatgaggttgacaagggttctttctctcaaatgcttcctttggtttgctaagaggtatctcctactcggccgggggcagaagacttttccttcttttcccagtttgcagtagttgggccagatttgtggaagtgggagaaaggcctgccctgcttctacatagagttggctgtcctgacttgatactcggtgtgccttccagagacccgcctccatctcctcaactccctggcttgatgcttaggtggtgatggctgttgggcacaggagttacataacagatctgtgatggacccaggagcagagccagctgagtgaatgtcatggagtgggagtggtcttgcatggctgtggtgtcccctgcagcttgtgcagggtatgtggcaagaggtgctcaccactcatctggaatggctagactggaagcacttggccctcttgggctctgcacccccaccccctcccacctggcctgcctgctcatcttcatgggcgcctggggagaccaattatggctgcttgtcatagtggctcaggtcaccgttcacacttcctgggaccaggacatcagagccctgagaagggtcaaggggccaagtgggcctagccttttactgacagctgggaaatgcaagcgtgtggaccagagcaccaagtgagttggggccggtgtgggttcagcaccgtgtccctacccagagctccatttgttgaaaacagcctttctctaccgtttcttcacttggacaactttaaactatgtattggctggtcgcggtggctcacgcctgtaatcccagcactttgggaggccgaggtgggcaggtaacttgaggtcaggaggtcgagaccagcctggccaacatggtgaaacctcatctctactaaaaatacaaaaattagcccagcgtggtgacacgcacctgtaatcccagctactcgggaggctgaggcagaagaatcgcttgaacttgggaggcaaagattgcagtgagctgagattgcatcaccgcacttcagcctgggagacagagcgagactgcatctcaaaaaacaaacagaaacctacatattttctatatttcccccaacattgaggctcatttcttggatgaacaatttaaatgtactgtgcctctctggcaatattttccaaaattacagatgtttctatactttcaccggcagctctgcctcccagaatttattctacggatgggttaacacgtgtgcaaaatgatttatttgcaaggttcgtcattgttgccttatttttaatagcaaaagattggaggcagcttaaatgttcattcgcaggggccaatgaacaaaccatggcccgtctaaacatgggataccgcgtggccataatacataagatggacgctcaacgcactgtgccggattgagcagcaaggtggattgccgagggaagaagcaggtctgggcggtgtgtctcggagctgccatcagtgtaaaagggaagagaatcaaaagtgtctttgcttgtctatgcccagggggtctctgggcagacaccgcaagtcggtgattgtgatgcctctggagggggtgctggtcatgggagattgcttgtttgctggagatcccatgtaccttttgattgctgaagcaggtgaatgtacgcctttccaagaaattaaaatgggccaggtgcggtggctcacgcctgtaatcccagcagtttgggaggctgatgttggaggatcacttgaggtgaggggttcgagaccagcctggccaacatgatgaaaccccatctccactaaaaatacacaaattagccagacatggtggtacatgcctgtaatcccagctgctctagaggctgaggcaggagaatcatgtgaaccctagaggctgagtttacagtgagccaagatcatgccattgtactccagcctgagctacagagcgagactctgtctcaaataataaaataaaataaattaaaaacataaggactgtaaccttgcctcctgcccagtgtaggaaggtcaaggttctggctacttctcaagtacaggagcctcactcaggccccagaccactaatcaaaaaatatgtgcttggttctcacaaaggggccgagtgtgagggcttgggtgttgcttggtaaatacgacccccggtcccggccttggagagatggagccctctctgggccccttggacacactgctgttggctgactttgtcattttcaacccttgctccgattggctcacgtcatgatttctgaaacctttgggggcttccccactgacagaaagatacactttaactcagcactgggcatcccaggccctctttactgggcctcttcttgagccgcacttggcctgtcaccccttcctctgtctgccctcttaactccccacctccgtgcctttgctcatatagttccctttgcctgcctttccgtccagagcagtctccacgtgcccaggtcctgtctgactttcaagggccagcttagtttccacttctgcactgccttctgacctccctggcttctgtgtaaactgcccagatcaagccacacaatggttcctgcacccaaggaagctccctggggccccctcctggccactcgctcttcgccggtagtcaccactcacaccttggcactttcgcgtggtgcctgccgctgcctgtttgggcctcccacacacagagtgtacagaacggactcctcggtgtctggctgccttcccgcagcactgtcagatcatccaggttgcctgtagtggccctttggtttttttctctgctgcgtaggagttcaccaaatataccactatttattcattctcctgtggacaggcattgggttatgtccagcctcttcggtgaattcattcttgtctttgggggcgcgtgtgcgctctttgctgggtatacacccagggtgggttgatggcttacctgactcagaatgtgtttgcatgaatgaaattcaggttggtatgagaaatctagggtgtcctggctggagccaggcttcttgattacagggacagagcaggtacagggatcctggtttagacagcctgctcccatggggtggtagcattgttggggtgcaggatgctgaatctgcaggggacctatccgctcagtgcccagtgggattttagctggctggaaaggtggtcacatgtagaggggctcaacaatccagctaaagaggctgagcgttggtccattgttctcaatttgagagaaaactgagatcatcaaaattaggactggtatgtactaaaggaaagaacctaattacaaggctgaattgagtaagccctcgctgagggactttggatttctttgttgttcccctttatttctgcacccccacccaagtgacagatatgtacatgattggatgattttgctttcctggttgagagattcctgggaacttggcccaggagaagggggagaaatgtggagccgctagagtggcctccgcttgtttgtgttgattgaaggggagacggaaggagagctgtggacccctgaccccttgtgagggcatgtgatccttttcaaaaggctcaccaggcagaagtgcctggccaggggccgctctttccctctaatcccctctggagaagggccaggctgtgggttgctgacctgctctgatgtggatcagcctcccccaataatgcagctgcccagaagctcagagagcccaggcaacccccaaaggcaggagggccggctgtcattcccgttgtcattcccaggcggctggagtgggagcagagcggtcagttcagatgaacagtgctcgagtctgaccccaaccagcgagttatggtaagatggaaggttctccatctatattaaataagagaacaaaagccctcccaggctgcatgaatattccagggatatatatgtgaacgggttgccagtttagcttggcctgtgggtggcagccgcctgagtgagcacttcgtggctgcagctctaaagggtttggatctgaaactaatgaatgaaaatatgacctcagaagatttaaagagagcaaatacccagcaacagaacctgggtcccagagactgttgggagcatgaaatcccaggctggccgaaggaggaagtgggagagcaatggcagctgacatcacatggtgccagaccttctcagtgctttctgtgttcactcattattccgtccctctctctcagaggcaggtatggctgcttccccattttatagatgaggaagctaaggcaaggagaggttgtgtaacttgctcacagacacaaagctagccagtggcaaagctggaggtcaggtctaggtggtcaggctccagagttctgcggatttcacagcacggcagtggcagtcggaagaaccatttgtcaggtgattgtgggcaaatgacgtcagcccttcaaacctctgttttgcatctgcaagctgcttgctgctgcaacaaattaccagaaacttagtgacttaaaacacaaattaggtcgggtgcggtggctcacatctgtaatcccagcactttgggaggctgaggtgagtggatcacttgaggtcaggagttcgagaccagcctggccaacatgatgaaaccctgtctctaacaaaaatataaaaaattagccaggcatttggccgggtgtggtggatcacgcctgtaatcccagaactttgggaggacaaggtgggcggaacacaaggtcaggagttcaagaccagcctgaccaatatggtgaaagcctgtctctactaagaatacaaaattagcaggacgtggtggcacgcgcctgtagtcccagttactgggaggcggaggttgcagtgagccaagatcacgccactgcactccagcctgggtgacagagtgagactccgtctcacaaaaaaaaaaaaaaaaaaaagccaggcgtggtggcacgtgcctgtaaccccagctactctggaggctgaggtgggagaattgcttgaacccaggaggcagaggttgcagtgagccgagatcgcaccactgcactccagcctgggccacagagtgagactccttctcaaaaacaaaacaaacacaaattatagattacttacaataagaaaaaccaataaaatgcatgcgcacacattaattatctcacagttttggaggtcaggtccagaatgtgtttcactggactaaaatcgaggtgttggcagggccatactccttctggaggctctgggggagaattatttccctgcctcttccagctcctagagaccacctccatctgtggcttgtggcgcctttcgccatctgcaagggcagcagcgtagcagcttccactttcctctctctgcttcctttgtcacgctgccctcttctcgctctctacctcctgccttcctcctacgaggacccttgtgatgacatgggcccacccaggttatccaggataatctctcatttcaggacccttaattcagtcacttctgcaaagtcccttttgccatgtaaggtagcatgttcacaggctctgggggttaggatgtcaacatctttgggggattattcttcagcctaccacacagcacataataaaatccatgggcagaggggatagcagcagtaaggtgtccctcaaacatgagttaaaatgactctgacgatagaatctgggtgagatggtgggatgctcccgaaataaactccaaggcaggtggccaagttcagtgacgacatagctgcgtagcttatctgagaaaggatgtctctgatggggggccagccggaagacgtctttcctggaagaggagggaggtggggcagtcttgggagaagtgagactttgggtcccacggccagctcctgccacattctcagtggatttcaggttgggaggagggataccattacagttgaaaataaacatagaaataaacgacactggatgtctgcttcctcatcagcctccctacagttctggaagacggtccaggcccacatccccttctctgctgttctagaattcagaacgctcagaaatcccaaaggttcttctaagtctgcagcagactaatttctgctgcaaaaatctgacctgaattgatgtgatactaattatggcctttaaaactatcttccttagggtgactaacagtatgttttcctatgaaagtactatatgtttgcttttggggtgttgcacccacccttccaggagtgtcactgtgtctagcagcataatcctttctaaaatctgaaaaattcggctgggcacggtggctcatgcctataatcccagagctttgggaggctgaggttggtggatcacttgaggtcaggagttcgagaccagcctggccaatatggtgaaactctgtctctactaaaaatacaaaaattagccgggcatgtggcttatgcctgtaatcccagctactaggaaggctgaggcaggagaatcgcttgaacctgggaggcggaggttgcagtgagccgagattgttcctctgtactccagtctgggtgacagagtgagacttagtctaaaaaaaaaaaaaaaaaaatttggaaaaattctaaattcttaaacccatttagtccaaaagccttagctacaggacagtgcacctggacttttctccctaagaaacacagtcagagaggtccagtcacctgcctcaggcccagcttaggtgataatgctgaggttccaactcagttccctgtctcagagcctgggacaaagtgcagactgcgtggcctggcctctttgccacctgctgggtggcgtgtgaatgagagacaggtgtggagactgcactcactggcaggtaggctgtatgtgggggaggtgggggtccttgaatttgttttctgtctgatctgcagcctggaactgagccagggggccttgtctggggaaggacagagaggcagagagattgcagaggagaggggaatagcagcagccattaggaagccttgggcctttgcctatcactatagcactgctctccaaacttccttggatcacacagccctatcagtaaaaaagaaaccagaacaaaacctcttgaacatgcacccccaatatgtggatattggtgtaattataagtgtatgttacaataagtatacacgtatattactttactgtttcagtgtgtacgtaataaaacctacaccaaaaacagaaaccaaaggccaagctaaagatgtaataaagaaaatttttactttgttgacggtacagaaacctcctgggttcatacacggggtcattttttggaacgtgcgctttcgtgatcagtgagagagagtttggaaggtctggctggcttcacgttcggcttgtttagagactgggttttaatggctgctttccctgcaaaagatcctgtctgggacaggaagctgcacacggagcagacgcatccttggctttctttctaaatcgggttactcatttttccatcccgtccactgagtatgcaaaggatttgttgaaatttggccggtacatttccatcctccctgatgccaatcacgtttttgtaaacgaaatggaaggtattttattttaaaattcttaacaagcgagtccaaaacccactaaaatgctttggaaaatttttaatggactagaaaattctgttacgtagctttttaggagttcagctatgagaggattttttttttctttttaaagtcagtgacagacatattgttttggtgcatgccagtaataccagctacttgggaggctgaggcaggagaatcacttgaattctggaggtggaggttgccgtgagtcgagatcgcgccattgcactccagcctgggcaacaagagcgaaactctatctcaaaaaaaaaaaaaaaaaaaaactattaatgtccacttccaggctttgatactgtactacagctagactagacgtcacccgttgaggaagctgggtgaagggcatacaggaccctagattctatttttgcaatttcctgtgaacctacgattatttcaaaatagaaagtttaaaaagtctttatcaagtacagatgcacaccgaagtatttaacattacatctgggggacagggaaagatgcaacaagattgcgcagtgttgctaaccgttaaagctcagtgatggagaggtggaaaaattcattacactatttgttccagttttgtatgtttgaaatgttccataataaaaagctttagacagcagaacaacagatttttctatgaaatgtgtagtaagatggggagggactcagtttgtatcagagatttattggttatcttgtggaaaagcaatcaataaggattgttggccgggcatggtggctcacgcctgtaatcccagcactttgggaggccgaggtgggaggatcacgaggtcaggagtttgataccaccctgtccaagagaccagcctggccaataaggtgaaaacctgtctctactaaaaatacaaaaattaggcaggcatggtggtgggtgcctgtaatcccagctacttgggaggctgaggcaggagaattgcttgaacccgggaggcagaggttacagtgagttgaagatcacaccactgcactccggcctgggtgacagagtgagactccaaatccaaaaaaaaaaaaaggtcccctgggctaatttttgtatttttagtagagacggggtttcttcatgttggtcaagctgttctcaaactcccgacctcagatgatccacccgccttggactcccaaagtgctgggattacaggcgtgagccaccatgcccagcccaacagtactattaactgaagtacagaccttattcagttttctgcattttcatgtagggtgtatgtgtagttctcttcaattttatcacatgtagattcatgtaaccactaccactatcaagatacaaactgtttcatcacctggaaggaactcccctggtaccctttaaaattacacacccccacccatcatcgtcactgtcctctgccaactactacaccatgctccatctttatagctttgtcattttgagcatgttacataaatggatcatgcagtatgtgaccttttgagattggctggtttcacaaaatgtaacacccctgagatccatccagatcacttgtgtgtatcagtaatttgttcttttttcttgctgggtactattccatggtctggatataccagagtttaactttttgcctgttgaagtacatgggttcttcccagattttgatgattacagatacggctgccgtgaacatttgtgtacaggcttttgtgtgaatatacgttttcattcctgtagaataaatgtccacagtgattactgggttgtgtagtaaatgcatgttagttttataagaaactgccggggccaggcatggtggctcacgcctgtaatcccagcactctgggaggctgaggtgggtggatcacaaggtcaggagttcaagaccagcctggccaatatggtgaaaccccgtcactactaaaaatacaaaaaaaattagccggccatgaggccgggtgcggtggctcacgcctgtaatcccagcactctgggaggctgaggcgggcggatcacaaggtcaggagttcaagatcagcctgaccaacatgatgaaaccccgtctctactaaaaatacaaaaattagctgggcatggtgacacgcgcctataatcccacctactcaggaggctgaggcaggagaatagcttgaaccagggaggtggaggttgcagtgagccaggatcgtgctactgcccctccagcctggggcgacagagtgagactccgtctcaaaaaaataaataaataaaaaaaattagctggccatggtggcgggcacctgtaatcccagctactcaggagacagaggcagagaattgcttgaacccgggaggtagaggttgcagtgagccaagatggtgccagtgcactccagcctgggcgacagaccaaggctctgtctcaaaaaaaaaaaaaaaaaagaaagtgccaaagttgttttccatggtggctgcaccattttatcttcccaccagcaatgtgtgggagatcaggtttctctgcatccttgccagcatttgatattgtcagtattttttattttataggtatatgatatatattttttggtacccaggtatgggatgtgaaggtgttttcagtttttcagtttgcatttccttaatggctaatgatgtttaacttttgttgtgtttgcctgtttgtttgttttggagacagagtcttgctctgtcgcccaggctggagtgcggtggtgtgatctcagctcactgcaagctccacctcccgggttcaagcgattgttctgcctcagcctcccgagtagctgggattacagacatgtaccaccatacccggctaatttttgtatttttagtagagacagggtttcgccatgttggccagactggtcttgaattcctggcttcaagtgatccacctgcctcagcccctcaaagttttgggattacaggcatgagccactgcgccatgtacttatttgctgtgtatctcttctttactgagatatctgttcatgtattttgcctattttcaagtgggattgtttggttttctttttaccatggtgctttttttttttttttttggagacaagagtcttgctctgtcccctaagggcgggagtgcaatggcacgatcttggctcactgcaacctctgccttcctggttcaagcaattctgctgcctcagcctcctgagtagctgggattacaggcgccagccaccacacctggctaatttttttatttttagtagagacagggtttcaccatgttggccaggctgatctcgaactcctgacctcaggtgatccgcccaccttggcctcccaaagtgctgggattacaggtgtgaaccaccgcgcctggcccatggagctttttgagcattcttcatacattcccaatgctagtcatttaccagatctgtgacttgcaaatatattcttccactctgtggcttgtttattcatagtgcataagtttttacttttcttatattgcagtttatcgattttttccttttatggatcatgcttttggtgtcaagtctaagaacacttggccatctctaggtttcaaatattttctcctgtcttctaaaaggtttagagttttacattttacatttaaatgtgtgatttattttgaattaatttttgtatatgtgtaagggtttatgttaaggttttttattatttatttatttatttatttttgagatggagtcttgctctgttgcccaggctggagtgcagtggtgtgatcttagctcactgcaaccaccacctcccaggttcaagtgattctcccgcctcagcctcccaagtagctggggattacaggcacatgccactacgtctggctaatttttgtatttttagtagagacagggtttcgctatgttgccctggctggtctcgaactcctagcctcaagtgatccacccaccttggcctcccaaagtgctgagattacaggtcttcgccaccgcacccaaccaatgttgttttattattattattttttaatcagtgttgatcaggttagcctcgaatgtgtagcctcacctccccgagtgccagggcaaccggcctgagccaccgcggctcccattattatttttatttatttatttactagtttttgagactgcgtctggctctgtcacccaggctggagtgcagtggcgcgatctcggctcactgcaagctctgcctcccgggttcacgccattctcctgcctcagcctccccagtagctgggactacaggcgcctgccaccaggcccggctaattttttgtatttttagtagagatggggtttcaccatgttagccaggttggtctcgatctcctgacctcgtgatccacccagctcggcctcccaaagtgctaggattacaggcgtgaggcaccttgctgggccctttctccatttattaatgggacttctataacctagaactgtcccttgttaattatgtaattcccctgaaatgttataatgaagaaactgaggctccgagagaagtacccgcgcaggttgcacgtggtggagtctagtgggagtcctgtagggtgactcacagcagaagcctggttatgtccccaccacatggaagccttctctgaccccctccccagcctgcccaagcccgatgcttgctctaggctcctgtagtgctggacactcacctcagcagtgcaaggggaagaggcctccaggtcactcctgcctgtggcatagagaaggcatgaagaatggcttggagcaccttaaaggctgaggctgggtctgccggtgcctggcatggagtccagaggcctcaggacttgttagaaagatgatttcagcatcttccatcagggccctctgtcatgttcctggcagaagtttaacacttggtcaattagggaaataatgggagacagttgtggtggctctcgcctgtaatcccagcactttgggaggccaagatgggaggatcgcttgagcccaggagctcgagaccagcgtgagtaacatggtaaaaccccatctctccaaaaaaatacaaaaattagctgggcatggtggctcatgcctgtagtcccagctacttgggaggctgaggtgggaggatggcttgaccccaggaggcagaagttgtaatgagctaaggtcatgctactgcactccagtctgggcaacagagtgaagctctgtctcaaaaaaaaaaaaaaatttgttggacatggtggcacatgcctgtggtcccagctgcttgggagactgaggtgggaggatcactcgggcctagggaggtcaaggctgcagtgagctgtgatcatgtcattgcactgcagcctgagcaacagagcaagactcttgtctcaaaaaaaaaaaaaaacagcatcatctggatctggtcctgccagagcagctggaattctgagcctcatctgtttgcatggactgcattggaaaaggggagacatggatggagcccttccccacccctttccccacgggagtaaagaggctgcaccagatggcattgcccctgcttccccaaggtccacaggctgtgccaggtgaacgtcctgcttgcctgtgggacctgggcaggcagcttcccggtcagtgcctgtacagagtgtgaaagggtcagaatccagtgcccaccctgccccagccccaacacactgtgaacagtttgcagagtctggccttgtggtcactgacttgggagtacgtttgacagcctccgtctgctgccttgggtccagggagcaaggcgagctctgggccttcaagcagctgcctgcacctgctttcttgggtattggggaccatgcgtctatgagccagaatacggctttaagtattttggggaattatgaaaacccttgaattgttgccaccctgggtggctgtaaaaccaagttctgcatcgttttcctcatctctaagatggagataatgttactttcttcaaagttgccttgagaaaatacatgagataatgtttggggaaatgctttgtaaaccaccggggttgcccaagagtaaaataagttgtttatgaattggcctcggtgcagaaacgtggccagcatgggttgggctgcggaaacactcccagccatggtggcttctcctccaccctgggggacctgcctcccctcctgctagaagagtctggaggctatgggaggaagggtatggccatgtcttgttaggaggctctggagcaggaggggtggctcagctaggtccccccactttgtaggaggtgaggagacaacgtgttgataggacctggccttgagtcctggctctgatttgggggtaagtcactcacatctctgggtgcatttcctcttgtgaaataaacgacctatatgaagaacgtgaaggggccctgaatgccaagtgggcatgggcacgtgagtgggcagagccgcaggaggaagctggcctgtagccttcacccacatcccagccctggctcgggtctgctctctggggttgcccctctgcctgggagtccaagctgggggtttctcaacaccgcccttagtcatgaacaaaacagccttcgacatccccccacaccttgcttggaaggtgaagatttgagcgtatttgtacttcctttggtccccccacaattccccatgtttattcatttaatttgggatgatagacaaagatgatgatttacaaccccagtctttttcaagaaatatttctggcactggttttcagttttgcaaccatacttacaggagctattcttggacttgtcactgtgtctctttttcaaagcttgccaccagtctttatatagacaccttctccatttttgaatttctttatatagacgccttctccagttttgagttttagtctcgatttgtgtctcaattggtgtgttaagagatcatgtatatgtgggaaaatagaaatgtacagggctctcctagggtgcacacttacagctaagagccgacatggtggcggagatgctgcggccgttggcgaggagccggggtgcaggcgggcagtgcagacagacagcgggcgcaggatcctctgcatcgcggggccaggctgcaggccgccgcacccaggaaggcccagggaaacctccgttggtgtcaggatattctgacttgaataccagcttgcgaatttggaagggaccatgagatcatctaggttgacctctgggttcagaccgagacggtcggggttggtgttcgctcattctctgagctcatttttggagcagggaacccacgtggctggttggcgggggagctggtgctcacgctccagccaggctctttcctcagtgcctacatactgcactttgcatcttttaaaattgtcgggtgtttctctggttgcattgcaggttattgccagagttggtgatttgggcagaggtgtttgctggatggcactgaccagcctgtcagcaggtggctgtactgaaagggccgccccatcagggcttgggtagagggtgcagccaggctcctgccttagtcttcttgagccactatgacaaaatcccataaatcgactgcctccttcctcacagttctggaggctgggaagtccaagatcaaggtgctggcagattcagtgtgtggagaaggctcactttttggctcagagacggtgccttctccctgtgtcctcatgtggtagaaggggcatggcagctctctggggttccttttatgagggcactaatctcattcatgagggccccacccactattctttgtttcactgtgaggcacctcacgatctttggaaacaagcagtgaaaatcagtagataggccaggcacagtgactcacgcctataatcccagcattttgggaggatgagacaggagaattgcttgaggccaggagttcaagaccaacctgggcagcatagggagacccccatctctacaaaaaattagaaaattagccaggcttgatgacgcacgcctgtaatcccagctactcaggaggctaaggcaggaggattcttgagcccgggaggcggaagccgcagggagccgagattgcaccattgcactctagcctgggcaacagagcgagaccctgtgtcaaaataataataatcaagttaagtattgtaagtgggctgggggtgtgagatcttgcctcaaagagtaggcaggaggatgaacatgtgagtggtgacagacccgcgtgttcgaggatgcggaatggctagaagtctcagaactggagaaggtgtgcaggcaggctttcaggaggggtggcacatgggctgggttaaaagatgagagtttagaggtacacagattggggaggagccacagagtctccaaaacagcacagctggatgatggggagtgggtcagccattaaggaaagggggagaaatggcgaagaacgcacacaggccctcggaggaggcctcagcagtaaagtggttttactggctccagggtataaagatgttcaggcccaccaggaagctcccgaatttctgttgtgtgtccacggttcccagtgctgcctgtatagtcccaaacagagccgctgtccccagggggcctgcattctaggtggggtggggggaacagttaataaatacatgagtgaatcgagttagtcgggtggtgtcgatgtaatgagtgctctggaggaaaagaaaggaaagcagggagtcaggcatgcccagcctgggagaggctgacatgttttcatggtggtcaaggtagagacctaaaggaagggtgggagggaggtatttgactgagcagagacagccagtgcaaaggccctgtggcagaagcaggcttaatatgttcaaggaacagcaaagaggccagcgtggctgcagctgaggatggaagtgggaactgtaggagctgagatcatagaggacaggaggtcccatcgagtccttgggtacggactatggtttttactctaggggagctgggagctattggagagttttgagcagtggcggcctggtctggctaatccttggaagactcacaaacatgctgagtggggactggtcattagaggcaggggcagaagcagagaaactggtcaggggcctgttgcatcaatccaggggagaggctggctgggacagggtgatggttggggtcaatacagacatggtcaggaggtgggtggagagacctggaagattctttccaatgctgccacttgccctgggaggagactcacattgcaatttcttctctctaggctagcttgtcactttctgcaaaggtttccctcagggagcctcctgctgccaggcaccatgacagtgaggggggatgtgctggccccggatccagcgtcgcccacgaccgcagcagcctcgcccagcgtctccgtgatccccgagggcagccccactgccatggagcagcctgtgttcctgatgacaactgccgctcaggccatctctggcttcttcgtgtggacggccctgctcatcacatgccaccaggtacccaagcctggcaaggggcctctagaaaggtccagaaaggttcctggctgaacagagtgtgggttaggctaggctaggccaggctgcactgcagtagtaggtaagccctctgttctcagaggcttccctcgatagaagtctacttcttgtttgtttgtttgttttttgagacagagtctcactctgtcacccaggctggagtacagtggtgcgatcttggctcactgcaacctctgtctcgtgggttggaacaattctcctgcctcagcctcctgagtagctgtgactacaggcgtgcgccaagaagtcgctttcttgcctgcgtcccagggcccagtgcagcgcaggttccgacgtgtggctctggcttcaagcctcgcccatctgacacctagcagcagggaatgtgcgaaggcactctgtatatttaaccacctccagccagaggtgacactcgtcactctgttcaccttccattggctggaactagtctcgtgtccagcctaaacaacagagagcctagaactgcaggagcacagggacagggaccgctttgcagatgagaaaatggagagcctgagagggagggggagaggaactagcctggtcacttggaagttggtggtagagtgggatagaagtcaagtctcccgtctgcctgtacttgtggccccagaggaggctgatgtgggctgggacgggccttggtggctgcagaggtttgaaggtggtccagtggagaggggcagggtgagtctgctcgtgttccctagtcagccccttgccagctgccctgtgtccccatcccttttagaacccatttgcgtccaaggcttttggctcatagcagatggagaatattttgttcttttcctccccagcccagggctcggctgggccaagtgtgatgtcatgagagctgggacgagacacccaggggctgcctggactgaggactgtggtagagcagctcttggcatttgtgtgtagcttttacttttttcctctgcttcctaaaagtagcattcattctcctaacttcctggtgaggtagctgcctaactaaacagagcagcagtggtgctgcctctgtttaccagatgggaggaggaggcacaacctgaggacatccctgcagccactcggccaggaagtgtgtccacccgccatagcgtgagggctgcgtctgtcttgccataagttaagggacggggcaaggctgcaacccaggtggcagtgatttagctcagtgctgccacagtcacagccggagtgaggtagagggaaagggcacacactgatggcccagagctgccagtgcgtgaggtcccctggggagcttgtggaaactgcatttccatcctcatccttggccttcctgtgggcaggggtgtgggctcactgccacctgcacctgcaagactgccccacaggcactgctgcatgcactccacgagccttgtgcacgcccgctggtctgagtctcacaatggccttgggaggcaagtcctgtcatcccgcattttgcagagcagggctctgaggctcaggggtaggtcacgtgcatcgggtcacagatgagtcggtggcagagctggaagcccacctgccctcccgtccctgtggacaggagggtccccagctgaccccacacctctgcccccagatctacatgcacctgcgctgctacagctgccccaacgagcagcgctacatcgtgcgcatcctcttcatcgtgcccatctacgcctttgactcctggctcagcctcctcttcttcaccaacgaccagtactacgtgtacttcggcaccgtccgcgactgctatgagggtgaggatggggacggagtggggagggctggcggggggctggggggctgggagcccctgtccccacattcctccccgaggggcttcatgaggactgtcttgacacaccccttgctgctttacctactacagggtttctgtcccaaattgacaggtaacagcacatgcagctagagtctcacctcacaggtacctggaagcaagggccctccacctgggtctcgcttctcaatgctggcgtctcaggcaggtacctggaagcaaggaccctccacctgggtctcgcttctcaatgctggcgtctcaggcaggtacctggaagcaagggccctccacctgggtctcgcttctcaatgctggcgtctcaggcaggtacctggaagcaagggccctccccctgggtctcgcttcttagtgctggcgtctcagacaggtacctggaagcaagggccctccccctgggtctcgcttcttagtgctggcgtctcaggcaggtacctggaagcaagggccctccccctgggtctcgcttctcaatgctggcgtctcaggcaggtacctggaagcaagggccctccacctgggtctcgcttctcaatgctggcgtctcaggcaggtacctggaagcaagggccctccccctgggtctcgcttctcaatgctggcgtctcaggcagggtgggggcagcaagcaagtggtctgtttgtagagaccccaggtggccccaggtgcagttgggtagggacccttccagggatccctggcaagtcagtggcagggctggggctctgtccccatgggtcttaattctgagggctttgtcccacgagtgggtgccctactgtgccacccaggaagaagactcgattccttccggggacttggttctggatgtggagtggagacatcacctgctcccatcctgagctccgaccacaggccaggagctgggttgccaagaggagaagccagcctcacccctgctgccctgcgggaggctgtggcccctaaacagtcaccacaaggagaccaggatgctgctctcatgggagctggcctctgacctgtcttgggcaggtcccaggcattcctcatctgttagaggccagcaatgcccaggtctgccctagacaggccagcaggaatggagaggaggggttcctcaagacccctgcattgggctgggtgcagtggctcacgcctgaaatcccattactttgggaggccgaggcgggcagatcacctgaagtcgggagttcgagaccagcctgaccaacatggagaaaccccgtctctactaaaaatacaaaattatccgggcataatggtgcatgcctgtaattccagctactcaggaggctgaggcaggagaatcacttgaacctgggaggcagaggttgtggtgagctgaggtcgtgccattgcactccagcctgggcaacaagagcgaaactctgtctcaaaaaaaaaaaaagacccctacattgatacccatgctattctcagagtgtgaggtttcctgtctcctacccacacctgtgctgctggttttaggtaaagtgaccggatgtggttttcctaatctcaggcagagcagctctggccatgcccagaagttgtctgtttccttgacctgggagggtgctgccccaggcctgcactctgtggatattggagtgaagcatgctcatcccccaagcagctggagtctctcttcctctccacgttgaaacttgtgtatccctgagaactcatagggcacaggaaatgcctttaggtttggcaagaaaatggaggcgcccaacaggagcccattgcaccccagcctttcatatttctgccttcccacccccaactgcggccacatcaggcaggtgcttcccagcctcaagggcttgatacgtgctgtgtccccggcctgggaagctcttctgctctgcgtggggtccctcctttccatccgtctgttccccgccactctcactcccagcacccatccaggtcctcggccccaccacagtctgcagctcccttgcttcgtgttccatcttcctgagcatgattagccctgccagagcaggatggggtgcagccatgcccagacagagccgggcccatgggagatgcctacttcctcccttttggatgaataagggacttaatcaaacccctgccctgtgccttgcattcctccatgtggggcctcagtaacatcccatgctccctcctcgcaggctggcgttccatcctgtccttccagatgagaatactgaggccagatggggacctgctcagggcttaactggggctctggtgtctgatatttctggaagcagccaagtctccagggaaacctctgggtccctggggcaccataaaggctggaattggcgaagtgtggggctgagaatccacttccattcagctgccagcctcgcatgggtacccaggggcagcctctgcccacctgttccttcagaagcacaaagctgttccctgccaaggtggcctctcctgtgtggtcgggggacaagtgtgggctctcttctcggcgggaccccaaagacaggcgcatggcagaaggcggggcacacagccaggggagcctccgcttcactctcactccgtgccccagaggcggcagcagatggctggcgggcacccctcactccagaagcctctttgttcaggccccgcctgccctgacctgcctccctgcccggggagaggtcctccaggaagtcggccaccctgtgaagcacatctcctagcaacgcgattatccctttggcctggcctctcccagggagtttacaaacagtacagcagctgcagtgaagttcaggctgcccccgagttcaccagcttttttttttttttttttttgagaccgttgccaggctggagtgcagtggggcaatctcagctcactgcattctccacctcctaggttcaagtgattcccctgcctcagcctcccgagtagctgggactacaggcgtgtgctaccacgcccagctaatttttgtatttttagtagagacggggtttcaccatgttggccaggatggtcttgatctcttgaccttgtgatctgcccgccttggcctcccaaagtggtgggattacagatgtgagccaccgtgcctggccaagttcaccagcttttagcatcagaggcagcggggcctgctccttgccttgtccctgcaccactgctctgggtcctagcccctctcttgcagctgcctctgcagagtcagtgatggggcagtcccccccgatccttgtatttcccctctcacccttccttctcagtgcccaagaggggccaggagggcccaggagggagtgggattcacctgggctggagaactctgcagatccagccagcccttcctgaggacctgctcagagctgagcactacggtcatttgctttttttcttttttttttagagacggagtctcgctctgtcgcccaggctggagtgcaatggtgcaatcttggctcactgcaacctcctcctcctgggttcaagcaattctcctgcctcagcctctcgagtagctgggactacaggcacacgccttcacgcccggctaattttttttttttttttgtattttagtagagacggggtttcaccgtgttgcctaggctggtcttgaactcctgagctcaggcaatccgcccgccttggcctcccaaagtgctgggattacaggcgtgagccaccaagcctggccctgctttttttctttgttaacaaaattctgcttttaaaaaacactaaaaaaaattacatttattaaagtaatataggcatatggttgaaacacgaaactcccctaactcctcactctgaagttcactgtactttcaactctttcagctgttttcttcctagaatgacctaaaatatgcttgtactggtttttgttgttgtttgtttttcagttttatatgatgttacatggtgacttcctactatggaagggctttgtttaagagacaggtctcgttcttttttttttttttttttttttttgagacggagtctcgctctgtcacccaggccggagtgcagtgacgccacctcggctcactgcaaactctgtctcctgggttcacgccattctcctgcctcagcctcctgagtagctgggactacaggcgcccgccaccacacctggctaattttttgtatttttagtagagatagggtttcatggtgttagccaggatggtctcgatctcctgatcttgtgatccacctgcctcggcctcccaaagtgctggtattacaggcatgagcaccgtgcctggcactgaagagacaggtcttgttctgacagacacaggcgtgtgccaccaccatgccccgctaatttttttttttttttttttgtagagatgaggtctcactgtgttgcccagggtggtcttgaactcctgggctcaaatgatccttgcgcctcgacctcccaaagtgccgggattataggcatgagccactgcatccaatgcatttccttttcttatgtaactttttgtttttgctccagttactacttgccttcttttagtttgctgagttttctacatatacctatcactagtttattcctaaatacttcagttgaatttaaaaaacaaaacaaaacaaaccaaccaaccagccctgctctcagtaaagccaggccaatccaggaatccctgagctctgccattttccccgtgacgcttctcctggtgccttctccctgtgctgcagtcaggaatgcctgctttccaggctcccgctgctcagctgttgccctggctctttcattcaccataagcctggaaaccgcttctcctgtgctgagtcacctgttccgtggaggctgtttcctccttgttcatggtttgctctccctgcctggttggagcacgtcttccagcagcttcctgagaaagagagtgcatgggaggtctattttgtggaatctgaaaatatctttagtatattgttgtatttgattggt

SEQ ID NO: 670 - protein, 112 aa, Homo sapiens
MAFGKPAKYWKLDPAQVYASGPNAWDTAVHDASEEYKHRMHNLCCDNCHSHVALALNLMRYNNSTNWNMVTLCFFCLLYGKYVSVGAFVKTWLPFILLLGIILTVSLVFNLR

SEQ ID NO: 671 - DNA, 341 bp, Homo sapiens
  source 1..341: mol_type = genomic DNA
atggcctttggaaagcctgccaagtactggaagttggaccctgctcaggtctatgctagcgggcccaacgcatgggacacggctgtgcacgacgcctctgaggagtacaagcaccgcatgcacaatctctgctgtgacaactgccactcgcacgtggcattggccctgaatctgatgcgctacaacaacagcaccaactggaatatggtgacgctctgcttcttctgcctgctctacgggaagtacgtcagcgttggggccttcgtgaagacctggctgcccttcatccttctcctgggcatcatcctcaccgtcagcctggtctttaacctccggtgaan

SEQ ID NO: 672 - DNA, 15456 bp, Homo sapiens
  source 1..15456: mol_type = genomic DNA
atggtgaaacgccacctctactaaaaatacaaaaattagccgggcgtggtggcacgcgcctgttatcccagctactcgggaggccgaggcaggatcgcctgaacctgggaggtggaggttgcagtgagccgagattgtgccattgccctccagcctgggcaacaagagaaaaaattccgcctcagaaaaaaaaaaaaaaaaaaagacttgggtttgcatcgtggtctctcaccttttgaacctcagtttctcacctgtaacaggagggaatacctaatttggatgtctaattagtttatggggattagaaacaattcatgtcaagtgcttggcacctaagaagtgctcaataaatagcgactgtaccacacctcctaggagccctcagcgtactgaattagagttctctataagtctccggcgctagactgcgaactgcctgagagcatcccttctgcagccgcggggcataagcggcaaagactcggggctggcaggcgcatagggagtggggcggggctggccgggcccagaggaacgcggctcggattcccgggggaaggccaagcggggcggaccccatctccgggaagtgacgccatggggacgagcggcaccagagccggggccagtcggagcggggcgcgcgccgcatggcggaagcggaagggagttctctgctcttgttgccgccgccgccacccccgcccaggatggcggaagtggaggcgccgacggcggccgagacggacatgaagcaatatcaaggctccggcggcgtcgccatggatgtggaacggagtcgcttcccctactgcgtggtgtggacgcccatcccggtgctcacgtgagtctcttccggcatccgcctggggacgaggagggcccagggagagccggagtcgggccgggctagcctccggccccaacgcgcagcaagccttttcctcgggtctggcccgcacgcctcgcccagtcaccagaaccccgccatccatgtagtgccagtttgtgcacacggctgggacacgctccctgctctcaatacacctggtgtagccagggagagagttgtaggccagcaggaaagggcaagtggctgggagactcgagctgtgagtgtgtagaagagggagccccttatcggatctgaggagacatttttattaattcactggtttattctctcattgagcaaatgcttactggtcgcttaccatattccagacatactgctgggtctgggagcaagagtgggagtttggttgggaccacacgagatcctgggatgtcaacattggaagggcccccagagatctgagagtccaaccctttgtctcacgtgccatctcagttgcaaactgggtttagatcccaggttgtctgcctcccagaccaaagttctttctgtaacatcagcctttgtcaggggagaagcaggtgctctggtactacttggcgccttttgggaggagctctcatatggggagaggtggtttgccctcctgcttcaaccttgacagctgataaacgtaacccctcctcaccgtgctggatagtttgccaagctcttaaacacccattttatcagaattaaacatccattttctaaggtaggttatcttctcagatggtgaagctgagctgcttgtagcattaagtgtcttgatcaggttcgcaccccaataagcaaaggcatgaagagctcagtcttctgatctaacttgctctttgcactacatcttatccactctcacctgatgggatagcttgttccgctatcaataacagccagtggtgatgtggagaagggatcatttggggccttaggtgttgctgattctaaaaagatcgtagtttttgaattatgttaaaatacttgaattattttgtgttttcaagtacttatgcatataagagcatccaaatctgttctttaaaaataaaatattgggacaggcgcggtggctcatgcctgtaatcccagcactctgggaggcagtggagggtggatcggtaggtagttcgagaccaacctggccatcgtggcgaaacccgtctctactaaaaatacaaaaattagctgggcatagtggcacgtgcctgtaatcccagctactctggaagctgaggcaggagaatcgcctcaacccgggaagtggagtttgcagtgagccgagattgcaccactgcacttcagcatgggcaacacagtgaaactccgtctcaaaataaatagtgaaataaaatcttaggaaaatgtgcacattaattcattcagtgttcttctaacacatgtgctaagtgacccctgtgttcccagatagttctaggtgatgcgaatatacagtgatgaataaaggagatatggtctttagacttttgagagtttaagtcatagtggaaggagatagacagtaaacaagtaagctaataaaagagcacctgatagtgatgagtgctgtgaagaaaataaaatattagtgtgaaaataacaggggccgggcgtggtggctcaggcctgtaatcccagcactttgggaggcccaggcgggcgaatcacctgaggtcaggagttcaagacaagcctgaccaacatggagaaaccccatctctactaaaaatacaaaattagccggggtggtggcacatgcctgtaatcccagctactcaggaggccgaggcaggagaatcacttgaacccgggaggtggaggttgcggtgagccaagatcgtgcttttgcactccagcctggacaacaagagcaaaactccgtttcaaaaaaaaagaaaataactgggagggatactcaggaaatgtattggttttcttaaaacctgtcttgtgatcctaaactctctttagcctttcttattctcaaaaacaccatctgtggcgtggtcctctgcggagaatggtagcagcgtgaggtggaggcaccacaatcccttgtcacctgggccaaaagcagctcatagcccatttctattcagatctgtgtacaggtgttcataagaccaagatgaataagacactgtgttcctgtcaaagggttcatgttcccttctgtgttagtccattcttgcactaatacttgagactggataatttctaaagaaaagaggtttaattgacccatgcttctgcaggctatacaggaagcatagtggcttctgcttctggggagacctcaggaagcttccagttatggtgtaaggcaaagggggagggaggcatctcacatggcgggattaggagcaagagggagtgaggggggagatgctacacacttttaaacaaccagatcttgggaaaactcactatcacgagaacagcaccaaagggatggtgctgaaccatttatgagaaaaccagcctcatgatcccaccaccagcccccacctccaatatggggactacagtttgacaggagatttggcggggacagatccaaaccatgtcaccttcaaaggactcacctccagcaggagggagagaaaggtcaattagccatcgtagtattactgtatagtgatgattgcagagctaggcatagatgtggcgcaagtaactgtcacctgtctttggaggagagatcagaggaggaaatggaacccaaagatctgtctaccccctcagagatgttggtaattctgcatgaaaaaccagtttagtgctcgcctcagcagcacatatactaaaattggaacgatacagagaagattagcatggcccctgcgcaaggatgacatgcagattcgtgaagcgttccatatttttgtctccctggacttcgagcaggagatggccactaccacatcctcctccctggagaagagctacaagctgccggatggccaggtcatcaccatcagcaacaagcggttccagtgtccggaggcgctgttccagccttccttcctgggtatggaatcttgcggcatccacgagaccacgttcaactccatcatgaagtgtgacgtagacatccgcaaagacctgtacaccaacatagggctatccagaggcaccaccatgtacccgggcatcaccgacaggatgcagaaggagattaacgccctggcatccagcaccatgaagatcaagctcattgtgcccccagagtgcaagtactctgtgtggatcagcggctccatcctggcctcactgtccaccttccagcagatgtggattagcaagcaggagtatgacgagtcaggcccctgtatcgtccaccgcaaatgcttctaaatggactgcgagccgatgcgtagcatttgctgcatgggttaattcagaagtataaattggccctggcaaatgcatatacctcatgctagcctcacgaaaatggaataagccttcgaaaagaaattgtcgttgaagcttgtatctaatatcagcactggattgtagaacttgttgctgattttgaccttgtattcaagttaactgttccccttggtatttgtttaataccctgtacatatctttgctttcaacccttagtacatgtggcttggtcactgcgtggcaaggtaagaatgtgcttgtggaagacaagtgcgacttggtgagtctgcatggccagcagtctccgatctttgcagggtattaatatgtcatggctgagtgttctgggatttctctagaggctgacaagggctcctgaaccagttgtttctgtcctgctggtctgtcagggttggaaaggccaagccataggacccagtttcctttcttagctgatgttttcctgccagaacactgtgggctgtgacttgctttgagttggaagcagtttgcatttacacctgtaaatgtattcatccttttaatttatgtaaggtttttttttgtatgcaattctcgattctttaaggagatgagaacagattttggttttctactgttatgtgagaacattaggccccagcggcatgtcattgtgtaaggaaaaataaaagtgctgctgtaaccaaaaaaaagggaaaaaaaagaaactagtttaatagctgctgctactaataaaaacagctaagattagatgcttactctgtcctaaacattgtatgttcactcactcaatcctaatgtcaacctatgaaagtagatactgttgtcaccattttatagatgaggaagtaaggcttagaagccagtgtggtgctcttttgctgagttagcctaccttcccagattgagctccaggatgagtgagtcatttattcatttattgtatctttataaagcacctattatgtactaggtcctgaatagaaggtagtccacaaagcggctctggagctgccttcctggagcttccaggctgacaaaccactttgagggtttcttctctggggcttccagcctttactctgatttccatccactgctgccagcacagctgtggcgtgtggaatcctggttggacccagacttcctcccaagcagatgaaaggattagggggcagagatgggggtggagggcagtcctgagatcaggatgagctactttcccataatcctgaatgtccatcctgtggcctgtggatcttctgcaacttattctatgttagtgcagtcagtcagatagtgcttatgtattgaacacctcgagatgacaacattgagcagctgccaagcggaaggcagagtcctaggcactgtgtaaatggataagtctatccatttaatcctcacaatagctcctcattaaggtaatttttactatccacagagagatgggaattagtaacttgcccagaacaaaggcaagcctcaacccagatgatatctgagcatgacttcactgttggcgtttgtttgttgtttttaatttttatttatttatttatttagagacagagtcttgctctgtcacccaggctggaatgcagtggcgtgatctcagctcactgcatcctccgcctccggggttcaagtgattctcgtgcctcagcctctcgagtagctgggattacaggcacatgccaccatgcccatctaatttttgtatttttagtatagacagggtttcgccatgtttcccaggctggtctcgaactcctgacctcaagtcatccaccggcctctgcctcccaaagtgctgggattacaggcgtgagccactgagcccagccttgactcactgcagcctcaacttcctgggcccagccttggctcactacagcctcaacttccttggatcaagtgatcctccagctaatttttagatttttttagatacagggtctcactgtgttgcccaggctggtctcaaattcctgggctcaagcaatccaactgccttggccttccaaagtgctatgattacaggcgtgagccacagcacccagccccagactctactcttaaatgcaggatgttcattcattatttagtcaacaaatatttagtgagttgcagctatatacaggcactgccgtagtaaacaagaaaaaatcctgtctctcttggagcttatgttctagtggagagacagcatataaataaccaagataattttggatggtagtagatactatgagggaagtaaagcattgtagtgggatctgggattgggtggctgtgctggaagacaccgttcaggcaagacctccgaaggtgacagtgaggctgaggcctaatcagtgaggagtcagctgtgccatgctctctgggaagagtgttccagacggaggagagggcagatacagagaaagcatggggtgggaggatttggcgtgtttgaggccacaagcaggcagtgtagctagagaggggactgagatgaagttcaagggataattagcaccacagtgttggaagaagttcgaagtgtattataagtgtagtaggaagccattaataggtgttgaacaggggaatgatggaatctgagttcaattctcaaaagaccactctggccctaccattgtctcaagcgctcaagctgtagacctggaagacccccatcctgtcagtcgtaaactctccagtcttcatttgaaagatcttttgaatccatgtgtttctcaccaccctgcccctgatcctctagtcaggacctccatcatctcttgccagtggtacagcagtagcccctgagctggcctctccccctttcgttcttccaggcacatgtaccactttcttgctctgcagtgttgttttctgcctgttgatgttgtgtcctttcacaggtcaaggttaaaagtcacctcctctgtgaagtctttactggctccaccccagccccctgtaactgcttttttaaactgcgtctctggaggcttggcctgcacccctagccaggtgctttatgctcgtgcccaggcagcattgaggccaggactcggccactggccctgtgagttctccttaaactggatcagtctctccagcacccaggtcctgtagggccatggttctcagaacacagacaggtctggggttcctatgtgtgacatattggggtgcatctgagatttattgttgttttttaatgcccatggtttataaaaaaggaacttttatttcctggcatacaccatgcttctgttccaatttctacccttgcacattctgtttctttgttatttcctcagggaagcctttcctgaactcccccacccatactggtgtcatgaccgcccacctttttttttttttttaactttcttattgaggtataacttatgtaccaaacggtgtgcgaatctcaagtatacagcaggaagaatttttgcatatcacacactcatgtaaccgccacccagacgggggctagaaagcaatgctaagacccagaggacccccttgtgccctcccagtcagttctaccacagattccaccccgctgtggacctctagccatagatcagtcttgccttttcttggacttcacgtaaacagagtgctatgttacgtactctgtgtaagatttccttcattcacccttatgtctgtgaaagcctgtgttgtgtgtagcagaagtgacactgtttttcattgttatggactatttcaatgtataactataccacacttattcatcgtactgttgttgaacatttggattctttctagttgtttttatcaattttattgaattatagtttacatataataaaatgtacacattttaagagtacagttcaatgagttttggcaaatgttatttcccaggggtgagggcaaagaaggttccaaaagtgaaactgctgaggcatttagtatagtgccaaactgttttccagaatggtagaaacaggccgggtacggtggctcacgcctgtaattccagcactttgggaggccgaggcaggcagatgacttgaggtcaggagttcgagaccagcctggccaacgtgatgaaacctcatgtctactaaaaatacaaaaattagccaggcatggtggtgcactcctgtagtcccagctactcgggaggctgaggcaggagaattgcttaaacccaggaggcggaggttgcagtgagctgagattgtgccaccgcacttcagccagggcaagagagcgagactccatctcaaaaacaaaatggtaggccgggtgcagtggcttatgcctgtaatcccagcactttgggaggccaaggcacgtggatcacgaggtcaagagatcgagaccatcctggccaacatggtgaaaccccatctctactaaaaatacaaaaattacccaggcgtggtggtgcacacctgtagtcccagctactcaggaggctgaggcaggagaattgcttgaactcgggaggcggaggttgcagtgagccaatattgtgccactgcactccagcctgggcgacagagcgagactccatttgaaaaaaaaaaaaaggtagaaacagtttatccctcccaccagcagtgaatgagagctctggttgtcccttgccctcacctgcattggtgttgctgtcgtttgagttacagccatcctggcgggatgctgaggtatcccattgtgctgtcggtttgcagttacccttgtctgtgcttccccagccttctggaccaccctaatggccacctgtcaatgaaacgtaatattcacatgcttctgtactgtatgaagggtccccagcgtccgtctaactggctgaaagatcccctaagctctgtcccttccccgtccttttcctcacaggtggtttttccccatcatcggccacatgggcatctgcacatccacaggagtcattcgggacttcgcgggcccctactttgtctcagtgagtccccattctgcccacccggggggttccaaggtttaagtggaaggctgtcctgtcttgcctgcaggcaggcttcgtctccccagacccaggagaacgtagataacccgcagtcctggccctggccctctgcccctcaccagtgtttgacccctttcccccttctcttgcctccaggacaggccgggagggcagtgtggccagaaggattcttaagtaactgacccagccctttgcccccacccctggggtaccgagacatgggtagggattagaggcaagagtggagagtcagaccatccaggaaccacatctctggaccttcagaaggtgggagtcaaggtggggggacacgggaggctgattcggttccctgggtgtggccatggagaagagggggtggggctttagaatgaagcagctgtgttctcaggtctgttccctggggctgtgaccaagactggtccagtgggctagcagcagaggagcatgcatcatcctgtctccaggtgtcagaggctggactgaaggggtgtggtggcaccaacctgtttatattaatagttgtcatgatcatcttaacacgacaaaggtctgtcactttgtacttaaaaatactttcacatccattactttatcatatatttttatggtgattaatcattgaccaggtctgtcagcagggtctccctgatctgaacccagagtctgtctctgtgtaagtcctgtaccccaggaataatgtgatgagtctaggacttcactgcagtgtctccctcacaggaagtccctctgggcccagcgcccccgccctgctatgaatgcagtcagactgctgggcgaggagatggtctccatgtgggccaccactgttgagtcaggaggccagaccatgatggaaacctcctgctggtcctcagagatcagagaagactgaccagagaacttggagaaaatgaggcccagagagggcaagagaattcctgggtgccacaccaagggacagtggcagctggagccccagatctttggtctctgatgcagtgctctgtgcacttgtgccacactgccttcttcctgcagaacagctgctagctctttagatgccatgccagccccagggcagggcccaggccccacttctggcccccccacccctgacataccctcttctaagtcactgcacttctgccacctacccaggtttgtcatctggcccaaatgtaagttcctcactgacctctgcttttgtccctcaacaggaggacaacatggcctttggaaagcctgccaagtaagtgatgaacacccatgtgactggctctagaggcaggtcgctcctgccggggcgggccaggccttctggggcacaggaggggccagcaccctgagaatagagtatttggggtcgggggagaggtcagccagggtccaccagagcatggcaaccccatacagagtgtgtaccgcaccagcccctggctagggcctttacctgtagaccatctgggccttgccacagctcttcaggtttgtattttcaactccatggcaagggtgaggaaagggaagggacttggtcaaggtcacacaggaagtggcagagctgggacccacacccagatctgtctccctctagactcactctcctgccctttgggaacaaatgaggcatggaaggtagaagagaggcattgtttggagctctgctggaaagttctggttggagagaataaaaaccgttcaaccttctgggagctattgctggtttggtttgggacatttggtcttcatctttgcagtctcgggtgcccacctcagctgtgggcctggtgagagtgcctcagtcatcagtgtcctcaggtgacctgttgcccaaggctgcactgggaggagagactgggccgaggaggagttggtgtcccacacagctgagatggcctggagcagggcttcctgctgccctctctggcttcctccggcaggcagcagtgtagtccaggagtctctgggccaccaggtgttcgctgccagactgctcttcaaggacagttttaagggcatcattttccaagcagtagcccctaagcggccccagtccaggccatggtctctagactcctccaccaagccattcccctacacaacagccagggggcgccctgacctcccagctctccttggcctgagacccaccgggcactctggtgcttggaacagcaattctcacccaccttgaggtttatgggctttagcaccatcagcttccctgccactcaccctggcaagctgcctgggagactaggggagagtgcttgctgctgggtaaactccccgcgtgatgtggcctcacctgcatctccagccttagctgccagcattccatcaccgtgtttctctttctgcatcctccaggagggctcagtcacttcagttatgggacatgctgcacagttttatgcctgtcacttagcttaagctgttccctcagcctggaatgcccacctcttctttctatgcctgcctaaccctcttccttcatactggacccaggtgtcacctccaggaagccttctcacaccccatcttagtccgttctggctgccataacaaaatctcatcaattgggtatcttagaaacaacagaaatgtatttctcacagttccgaagactggacagtcctgggtgcgggtgctggtagagtcagtgtctggtgagggcctgaggtgcctttccactgtgtccccacgtggtggaggggtgaggggtctccctcagggctcttttataaggacacggatcccattcatgagagctaatcaccccatggcctaatcacctcccaaaggccccacctcctcataccatcaccttgagggttaagatttcaacatatgaacttggggacacagactttcagagcatagcacccccaatttcattccatatccccccaggatcccccatggcaccagccacctcaccctgtgtcacagttgactgccacataacacttgccccagatctggcttactgtacatctcagcacccagctcaggcccgggcacagggcaggcctcagaggacgtgcgtagagctgagggcacaaaggagccaagcaagtgtccagagcccttctctccccccaggtactggaagttggaccctgctcaggtctatgctagcgggcccaacgcatgggacacggctgtgcacgacgcctctgaggagtacaagcaccgcatggtaggtgggccagggcggcaccggcactccccaggtggggaccaggggggaggctcccctgcagcccatcctgaccagcccttctggtgcctccagcacaatctctgctgtgacaactgccactcgcacgtggcattggccctgaatctgatgcgctacaacaacagcaccaactggaatatggtgacgctctgcttcttctgcctgctctacgggaagtacgtcaggtgagctgccctcctgcctgcccacccacacactgcccagaggctgctctcccaaggatcctagaaagaccattcctagcgtccttcagtcagccaggacagttggaacagatgccagttggagccgtggtggttctagagtgacgagctgagggcctgatggagagggaggtggctgtgctgaagtccagctccacctgggccccaaatgcagctctggctcttgcctgctgtgagaccatgggcaactgccttggtctctcttagccacagctgtctctggtgaaatgcaggcaatgattccggctcctcagggaggcttctacggatccctgtgctccggtaaagtgagcagatagatcctctcataatgactgccccacaggtcccttcctaggcagagagattgagtgagtcgcccatggtcgccacagcatggacacagcagagcccagactcgtgagccagcataggttagtgctgatctggccgcctctccaagctttcctcttagccacgttcatcattaagaggttctgaaaagaagacttttagggatatttttaagtactgcatggcttttagaagtcccctgagaataactggtcacacagaggttgaacccagacccctggctcccagctgcttggctccagccacaacactgctgacccttgccagccccagagctcccagtagtccccattatgaagtccataggcagagggcacacgtggcttccatacccaaactgcaattcctggtcctcttgctggagaccctagaggtaggtggctatagatggagccagtgaggcctagaaatggggagcatgtttcctgttcccaaccagcgaggtgtcagtaaatcaccaggagcgcggagcagcccctgcccgggaccatagctggtgatcccccatagtgggcaaccatgcccagcctgcttccttgattggccaagtttggggtgagggggtggttgggttttccttagggatggcagccctattggggtctgtgggtgctcagggctgcgggccgcatgcctgctcaccaggccctgcccacctatgctcgctcctttctctctgtcagcgttggggccttcgtgaagacctggctgcccttcatccttctcctgggcatcatcctcaccgtcagcctggtctttaacctccggtgatggctgctcggtggccccacacccaccagggtcccgaggaaacagccgccatcccttttggttccagatttttttctcctcaccccaaaaggcagggttgggcctgctgttgtggaccgggggtcggggctggcaggatggaaggactgaggaccagcatgaagtgggggtttgttgtctccctgcctctcagaagcaccctgtcccctcctccccaggcctgtgactccggccctggaagcccctttgttcttctgttgaaaggctttggcttcccgctgtagagctgctcccgccaccacctgctggggtcctgcctcagcccagtgcccagtatggggagaggaggacatttgggctcacctgtcaaggtggccctgggaccagagctggtcccagcatggggtgcaccgggtacacttaacgtgtctctataagccaagttgcttcaggaccttcaccactggcctctagaatggtccagaggggctggctgggtccctttgtcagactcctgccggcagctgccctgggggacatgtgtgcccatctggcatcctccagcccgtgcagtccgctcttcactgttccacggcctcccagtgcctcccagcattggacccatctccccctgcagtttgaggccagagaggtgagtggacctgacaagtgccagagtaaccgtgtagacagagcagtgtagacagcactcagccccagccccaggtgtggacctcatgctggtgatggctcccctgggtggcctgccagcacagccagtgccatcagggagctgaaggggctgtcccccacctaactccagctcccccttcacgttgtcaccaaggccctgtgccgcccgcctcgcccccctgctctgtggattcctttgggaagggctccctgggcaggacaataaagagttttgactccagttggtgccctgtcattgttttctccctctctggggcccccttgccccttagctcatagcgtcttggtattcttgggaccctattacccttgacaagggtctagttgccagcaccatggttgagtctgcgtccagtgcctggggccatcagcatccctcaggtatatcccgcccctgaagtctggggattccctgccattctccattccccattccaaagctttcctcttgaggcaggtgggcattgaaaccccttccatcgtccctgttgggaaggacttgtaggcttggggttagggctgagtagagcctccactgctgtccccaccacccgccggggtacagagttggggatgagccaagagcactgccagcctctggtcactgtatccatccagccttcgcttgcctccgatcctttgctctccaccatccctctcatggcggccctgcctaaccaaggcccagcttaaaagccgcttcctccctgaagcctttcccaaccctgtccatgcatcacttcagttgaactagccaaggatttggtcttgaacgtggccttgaggacatgctctagcagctggccatggggtccctggt

SEQ ID NO: 673 - protein, 233 aa, Homo sapiens
MSTESMIRDVELAEEALPKKTGGPQGSRRCLFLSLFSFLIVAGATTLFCLLHFGVIGPQREEFPRDLSLISPLAQAVRSSSRTPSDKPVAHVVANPQAEGQLQWLNRRANALLANGVELRDNQLVVPSEGLYLIYSQVLFKGQGCPSTHVLLTHTISRIAVSYQTKVNLLSAIKSPCQRETPEGAEAKPWYEPIYLGGVFQLEKGDRLSAEINRPDYLDFAESGQVYFGIIAL

SEQ ID NO: 674 - DNA, 702 bp, Homo sapiens
  source 1..702: mol_type = genomic DNA
atgagcactgaaagcatgatccgggacgtggagctggccgaggaggcgctccccaagaagacaggggggccccagggctccaggcggtgcttgttcctcagcctcttctccttcctgatcgtggcaggcgccaccacgctcttctgcctgctgcactttggagtgatcggcccccagagggaagagttccccagggacctctctctaatcagccctctggcccaggcagtcagatcatcttctcgaaccccgagtgacaagcctgtagcccatgttgtagcaaaccctcaagctgaggggcagctccagtggctgaaccgccgggccaatgccctcctggccaatggcgtggagctgagagataaccagctggtggtgccatcagagggcctgtacctcatctactcccaggtcctcttcaagggccaaggctgcccctccacccatgtgctcctcacccacaccatcagccgcatcgccgtctcctaccagaccaaggtcaacctcctctctgccatcaagagcccctgccagagggagaccccagagggggctgaggccaagccctggtatgagcccatctatctgggaggggtcttccagctggagaagggtgaccgactcagcgctgagatcaatcggcccgactatctcgactttgccgagtctgggcaggtctactttgggatcattgccctgtga

SEQ ID NO: 675 - DNA, 3972 bp, Homo sapiens
  source 1..3972: mol_type = genomic DNA
gggctgtcccaggcttgtccctgctacccccacccagcctttcctgaggcctcaagcctgccaccaagcccccagctccttctccccgcagggacccaaacacaggcctcaggactcaacacagcttttccctccaaccccgttttctctccctcaaggactcagctttctgaagcccctcccagttctagttctatctttttcctgcatcctgtctggaagttagaaggaaacagaccacagacctggtccccaaaagaaatggaggcaataggttttgaggggcatggggacggggttcagcctccagggtcctacacacaaatcagtcagtggcccagaagacccccctcggaatcggagcagggaggatggggagtgtgaggggtatccttgatgcttgtgtgtccccaactttccaaatccccgcccccgcgatggagaagaaaccgagacagaaggtgcagggcccactaccgcttcctccagatgagctcatgggtttctccaccaaggaagttttccgctggttgaatgattctttccccgccctcctctcgccccagggacatataaaggcagttgttggcacacccagccagcagacgctccctcagcaaggacagcagaggaccagctaagagggagagaagcaactacagaccccccctgaaaacaaccctcagacgccacatcccctgacaagctgccaggcaggttctcttcctctcacatactgacccacggctccaccctctctcccctggaaaggacaccatgagcactgaaagcatgatccgggacgtggagctggccgaggaggcgctccccaagaagacaggggggccccagggctccaggcggtgcttgttcctcagcctcttctccttcctgatcgtggcaggcgccaccacgctcttctgcctgctgcactttggagtgatcggcccccagagggaagaggtgagtgcctggccagccttcatccactctcccacccaaggggaaatggagacgcaagagagggagagagatgggatgggtgaaagatgtgcgctgatagggagggatggagagaaaaaaacgtggagaaagacggggatgcagaaagagatgtggcaagagatggggaagagagagagagaaagatggagagacaggatgtctggcacatggaaggtgctcactaagtgtgtatggagtgaatgaatgaatgaatgaatgaacaagcagatatataaataagatatggagacagatgtggggtgtgagaagagagatgggggaagaaacaagtgatatgaataaagatggtgagacagaaagagcgggaaatatgacagctaaggagagagatgggggagataaggagagaagaagatagggtgtctggcacacagaagacactcagggaaagagctgttgaatgcctggaaggtgaatacacagatgaatggagagagaaaaccagacacctcagggctaagagcgcaggccagacaggcagccagctgttcctcctttaagggtgactccctcgatgttaaccattctccttctccccaacagttccccagggacctctctctaatcagccctctggcccaggcagtcagtaagtgtctccaaacctctttcctaattctgggtttgggtttgggggtagggttagtaccggtatggaagcagtgggggaaatttaaagttttggtcttgggggaggatggatggaggtgaaagtaggggggtattttctaggaagtttaagggtctcagctttttcttttctctctcctcttcaggatcatcttctcgaaccccgagtgacaagcctgtagcccatgttgtaggtaagagctctgaggatgtgtcttggaacttggagggctaggatttggggattgaagcccggctgatggtaggcagaacttggagacaatgtgagaaggactcgctgagctcaagggaagggtggaggaacagcacaggccttagtgggatactcagaacgtcatggccaggtgggatgtgggatgacagacagagaggacaggaaccggatgtggggtgggcagagctcgagggccaggatgtggagagtgaaccgacatggccacactgactctcctctccctctctccctccctccagcaaaccctcaagctgaggggcagctccagtggctgaaccgccgggccaatgccctcctggccaatggcgtggagctgagagataaccagctggtggtgccatcagagggcctgtacctcatctactcccaggtcctcttcaagggccaaggctgcccctccacccatgtgctcctcacccacaccatcagccgcatcgccgtctcctaccagaccaaggtcaacctcctctctgccatcaagagcccctgccagagggagaccccagagggggctgaggccaagccctggtatgagcccatctatctgggaggggtcttccagctggagaagggtgaccgactcagcgctgagatcaatcggcccgactatctcgactttgccgagtctgggcaggtctactttgggatcattgccctgtgaggaggacgaacatccaaccttcccaaacgcctcccctgccccaatccctttattaccccctccttcagacaccctcaacctcttctggctcaaaaagagaattgggggcttagggtcggaacccaagcttagaactttaagcaacaagaccaccacttcgaaacctgggattcaggaatgtgtggcctgcacagtgaagtgctggcaaccactaagaattcaaactggggcctccagaactcactggggcctacagctttgatccctgacatctggaatctggagaccagggagcctttggttctggccagaatgctgcaggacttgagaagacctcacctagaaattgacacaagtggaccttaggccttcctctctccagatgtttccagacttccttgagacacggagcccagccctccccatggagccagctccctctatttatgtttgcacttgtgattatttattatttatttattatttatttatttacagatgaatgtatttatttgggagaccggggtatcctgggggacccaatgtaggagctgccttggctcagacatgttttccgtgaaaacggagctgaacaataggctgttcccatgtagccccctggcctctgtgccttcttttgattatgttttttaaaatatttatctgattaagttgtctaaacaatgctgatttggtgaccaactgtcactcattgctgagcctctgctccccaggggagttgtgtctgtaatcgccctactattcagtggcgagaaataaagtttgcttagaaaagaaacatggtctccttcttggaattaattctgcatctgcctcttcttgtgggtgggaagaagctccctaagtcctctctccacaggctttaagatccctcggacccagtcccatccttagactcctagggccctggagaccctacataaacaaagcccaacagaatattccccatcccccaggaaacaagagcctgaacctaattacctctccctcagggcatgggaatttccaactctgggaattccaatccttgctgggaaaatcctgcagctcaggtgagatttccggctgttgcagctggccagcagtccggagagagctggagaggagccgcattctcaggtacctgaatcacacagccaagggacttccagagattcgggtgtctaggcttcaaatcaccctgtcctaactctgcaacctgaaccagccacttaacctatctatccaatggggataggaatgtccaccacacatagggcatgtgagagaaggcctgacctccatcagaggacctcactcagcccttggcacagtgggcacttagtgaattctggcttccttcaaccagtttccagctgttctatccccttccattctc

SEQ ID NO: 676 - protein, 275 aa, Homo sapiens
METLLGVSLVILWLQLARVNSQQGEEDPQALSIQEGENATMNCSYKTSINNLQWYRQNSGRGLVHLILIRSNEREKHSGRLRVTLDTSKKSSSLLITASRAADTASYFCATANAGGTSYGKLTFGQGTILTVHPNIQNPDPAVYQLRDSKSSDKSVCLFTDFDSQTNVSQSKDSDVYITDKTVLDMRSMDFKSNSAVAWSNKSDFACANAFNNSIIPEDTFFPSPESSCDVKLVEKSFETDTNLNFQNLSVIGFRILLLKVAGFNLLMTLRLWSS

SEQ ID NO: 677 - DNA, 828 bp, Homo sapiens
  source 1..828: mol_type = genomic DNA
atggaaactctcctgggagtgtctttggtgattctatggcttcaactggctagggtgaacagtcaacagggagaagaggatcctcaggccttgagcatccaggagggtgaaaatgccaccatgaactgcagttacaaaactagtataaacaatttacagtggtatagacaaaattcaggtagaggccttgtccacctaattttaatacgttcaaatgaaagagagaaacacagtggaagattaagagtcacgcttgacacttccaagaaaagcagttccttgttgatcacggcttcccgggcagcagacactgcttcttacttctgtgctacggctaatgctggtggtactagctatggaaagctgacatttggacaagggaccatcttgactgtccatccaaatatccagaaccctgaccctgccgtgtaccagctgagagactctaaatccagtgacaagtctgtctgcctattcaccgattttgattctcaaacaaatgtgtcacaaagtaaggattctgatgtgtatatcacagacaaaactgtgctagacatgaggtctatggacttcaagagcaacagtgctgtggcctggagcaacaaatctgactttgcatgtgcaaacgccttcaacaacagcattattccagaagacaccttcttccccagcccagaaagttcctgtgatgtcaagctggtcgagaaaagctttgaaacagatacgaacctaaactttcaaaacctgtcagtgattgggttccgaatcctcctcctgaaagtggccgggtttaatctgctcatgacgctgcggctgtggtccagctga

SEQ ID NO: 678 - DNA, 5851 bp, Homo sapiens
  source 1..5851: mol_type = genomic DNA
aaggccttatatcgagtaaacggtagtgctggggcttagacgcaggtgttctgatttatagttcaaaacctctatcaatgagagagcaatctcctggtaatgtgatagatttcccaacttaatgccaacataccataaacctcccattctgctaatgcccagcctaagttggggagaccactccagattccaagatgtacagtttgctttgctgggcctttttcccatgcctgcctttactctgccagagttatattgctggggttttgaagaagatcctattaaataaaagaataagcagtattattaagtagccctgcatttcaggtttccttgagtggcaggccaggcctggccgtgaacgttcactgaaatcatggcctcttggccaagattgatagcttgtgcctgtccctgagtcccagtccatcacgagcagctggtttctaagatgctatttcccgtataaagcatgagaccgtgacttgccagccccacagagccccgcccttgtccatcactggcatctggactccagcctgggttggggcaaagagggaaatgagatcatgtcctaaccctgatcctcttgtcccacagatatccagaaccctgaccctgccgtgtaccagctgagagactctaaatccagtgacaagtctgtctgcctattcaccgattttgattctcaaacaaatgtgtcacaaagtaaggattctgatgtgtatatcacagacaaaactgtgctagacatgaggtctatggacttcaagagcaacagtgctgtggcctggagcaacaaatctgactttgcatgtgcaaacgccttcaacaacagcattattccagaagacaccttcttccccagcccaggtaagggcagctttggtgccttcgcaggctgtttccttgcttcaggaatggccaggttctgcccagagctctggtcaatgatgtctaaaactcctctgattggtggtctcggccttatccattgccaccaaaaccctctttttactaagaaacagtgagccttgttctggcagtccagagaatgacacgggaaaaaagcagatgaagagaaggtggcaggagagggcacgtggcccagcctcagtctctccaactgagttcctgcctgcctgcctttgctcagactgtttgccccttactgctcttctaggcctcattctaagccccttctccaagttgcctctccttatttctccctgtctgccaaaaaatctttcccagctcactaagtcagtctcacgcagtcactcattaacccaccaatcactgattgtgccggcacatgaatgcaccaggtgttgaagtggaggaattaaaaagtcagatgaggggtgtgcccagaggaagcaccattctagttgggggagcccatctgtcagctgggaaaagtccaaataacttcagattggaatgtgttttaactcagggttgagaaaacagctaccttcaggacaaaagtcagggaagggctctctgaagaaatgctacttgaagataccagccctaccaagggcagggagaggaccctatagaggcctgggacaggagctcaatgagaaaggagaagagcagcaggcatgagttgaatgaaggaggcagggccgggtcacagggccttctaggccatgagagggtagacagtattctaaggacgccagaaagctgttgatcggcttcaagcaggggagggacacctaatttgcttttcttttttttttttttttttttttttttttttgagatggagttttgctcttgttgcccaggctggagtgcaatggtgcatcttggctcactgcaacctccgcctcccaggttcaagtgattctcctgcctcagcctcccgagtagctgagattacaggcacccgccaccatgcctggctaattttttgtatttttagtagagacagggtttcactatgttggccaggctggtctcgaactcctgacctcaggtgatccacccgcttcagcctcccaaagtgctgggattacaggcgtgagccaccacacccggcctgcttttcttaaagatcaatctgagtgctgtacggagagtgggttgtaagccaagagtagaagcagaaagggagcagttgcagcagagagatgatggaggcctgggcagggtggtggcagggaggtaaccaacaccattcaggtttcaaaggtagaaccatgcagggatgagaaagcaaagaggggatcaaggaaggcagctggattttggcctgagcagctgagtcaatgatagtgccgtttactaagaagaaaccaaggaaaaaatttggggtgcagggatcaaaactttttggaacatatgaaagtacgtgtttatactctttatggcccttgtcactatgtatgcctcgctgcctccattggactctagaatgaagccaggcaagagcagggtctatgtgtgatggcacatgtggccagggtcatgcaacatgtactttgtacaaacagtgtatattgagtaaatagaaatggtgtccaggagccgaggtatcggtcctgccagggccaggggctctccctagcaggtgctcatatgctgtaagttccctccagatctctccacaaggaggcatggaaaggctgtagttgttcacctgcccaagaactaggaggtctggggtgggagagtcagcctgctctggatgctgaaagaatgtctgtttttccttttagaaagttcctgtgatgtcaagctggtcgagaaaagctttgaaacaggtaagacaggggtctagcctgggtttgcacaggattgcggaagtgatgaacccgcaataaccctgcctggatgagggagtgggaagaaattagtagatgtgggaatgaatgatgaggaatggaaacagcggttcaagacctgcccagagctgggtggggtctctcctgaatccctctcaccatctctgactttccattctaagcactttgaggatgagtttctagcttcaatagaccaaggactctctcctaggcctctgtattcctttcaacagctccactgtcaagagagccagagagagcttctgggtggcccagctgtgaaatttctgagtcccttagggatagccctaaacgaaccagatcatcctgaggacagccaagaggttttgccttctttcaagacaagcaacagtactcacataggctgtgggcaatggtcctgtctctcaagaatcccctgccactcctcacacccaccctgggcccatattcatttccatttgagttgttcttattgagtcatccttcctgtggtagcggaactcactaaggggcccatctggacccgaggtattgtgatgataaattctgagcacctaccccatccccagaagggctcagaaataaaataagagccaagtctagtcggtgtttcctgtcttgaaacacaatactgttggccctggaagaatgcacagaatctgtttgtaaggggatatgcacagaagctgcaagggacaggaggtgcaggagctgcaggcctcccccacccagcctgctctgccttggggaaaaccgtgggtgtgtcctgcaggccatgcaggcctgggacatgcaagcccataaccgctgtggcctcttggttttacagatacgaacctaaactttcaaaacctgtcagtgattgggttccgaatcctcctcctgaaagtggccgggtttaatctgctcatgacgctgcggctgtggtccagctgaggtgaggggccttgaagctgggagtggggtttagggacgcgggtctctgggtgcatcctaagctctgagagcaaacctccctgcagggtcttgcttttaagtccaaagcctgagcccaccaaactctcctacttcttcctgttacaaattcctcttgtgcaataataatggcctgaaacgctgtaaaatatcctcatttcagccgcctcagttgcacttctcccctatgaggtaggaagaacagttgtttagaaacgaagaaactgaggccccacagctaatgagtggaggaagagagacacttgtgtacaccacatgccttgtgttgtacttctctcaccgtgtaacctcctcatgtcctctctccccagtacggctctcttagctcagtagaaagaagacattacactcatattacaccccaatcctggctagagtctccgcaccctcctcccccagggtccccagtcgtcttgctgacaactgcatcctgttccatcaccatcaaaaaaaaactccaggctgggtgcgggggctcacacctgtaatcccagcactttgggaggcagaggcaggaggagcacaggagctggagaccagcctgggcaacacagggagaccccgcctctacaaaaagtgaaaaaattaaccaggtgtggtgctgcacacctgtagtcccagctacttaagaggctgagatgggaggatcgcttgagccctggaatgttgaggctacaatgagctgtgattgcgtcactgcactccagcctggaagacaaagcaagatcctgtctcaaataataaaaaaaataagaactccagggtacatttgctcctagaactctaccacatagccccaaacagagccatcaccatcacatccctaacagtcctgggtcttcctcagtgtccagcctgacttctgttcttcctcattccagatctgcaagattgtaagacagcctgtgctccctcgctccttcctctgcattgcccctcttctccctctccaaacagagggaactctcctacccccaaggaggtgaaagctgctaccacctctgtgcccccccggcaatgccaccaactggatcctacccgaatttatgattaagattgctgaagagctgccaaacactgctgccaccccctctgttcccttattgctgcttgtcactgcctgacattcacggcagaggcaaggctgctgcagcctcccctggctgtgcacattccctcctgctccccagagactgcctccgccatcccacagatgatggatcttcagtgggttctcttgggctctaggtcctgcagaatgttgtgaggggtttatttttttttaatagtgttcataaagaaatacatagtattcttcttctcaagacgtggggggaaattatctcattatcgaggccctgctatgctgtgtatctgggcgtgttgtatgtcctgctgccgatgccttcattaaaatgatttggaagagcagagactgtgcctctgtttgactgggtttggtaggagtcattttctgcttgctggtgatcactagctgggcagagaaaaaccaaggcatttgtctatgatgctgtccaggaagcctcattcaacaagctgcctaagtcaacctcttcttggaataacctctaaaagcttccgcttagcaggctatgctgagggccaggaaaacccacctaccagcttggacccctcctctcccactctcatgccacgccacgggaccacccataacaggagcccacacacatgggtggcagtgacctgcggcagacagggaccacacagcaagtgtccccaaaatgccacccactgtctcctgccctccaggagcatttcctttgcctctcctctcagactgggtttccactgaaactgtgcattgtctcacaaattcgtggctggggaccacccaccactctgctgcctgatccagccccacgccagccctttgaggtgcccaagctgacaccaggagcaaggttgagaggaagctgtgaccccagcaggactttatgttcccaccatcccggatgtgagaatgaggaaaaaaggagatgagctgtctcccc

SEQ ID NO: 679 - protein, 15 aa, synthetic construct
GGGGSGGGGSGGGGS

SEQ ID NO: 680 - protein, 20 aa, synthetic construct
METDTLLLWVLLLWVPGSTG

SEQ ID NO: 681 - RNA, 20 nt, synthetic construct
  source 1..20: mol_type = other RNA
aagtcaacttcaatgtcgga

SEQ ID NO: 682 - RNA, 20 nt, synthetic construct
  source 1..20: mol_type = other RNA
acaaagtcacatggttcaca

SEQ ID NO: 683 - RNA, 20 nt, synthetic construct
  source 1..20: mol_type = other RNA
acagcccaagatagttaagt

SEQ ID NO: 684 - RNA, 20 nt, synthetic construct
  source 1..20: mol_type = other RNA
acccagacacatagcaattc

SEQ ID NO: 685 - RNA, 20 nt, synthetic construct
  source 1..20: mol_type = other RNA
actcacgctggatagcctcc

SEQ ID NO: 686 - RNA, 20 nt, synthetic construct
  source 1..20: mol_type = other RNA
acttgtctttcagcaaggac

SEQ ID NO: 687 - RNA, 20 nt, synthetic construct
  source 1..20: mol_type = other RNA
agtcacatggttcacacggc

SEQ ID NO: 688 - RNA, 20 nt, synthetic construct
  source 1..20: mol_type = other RNA
atactcatctttttcagtgg

SEQ ID NO: 689 - RNA, 20 nt, synthetic construct
  source 1..20: mol_type = other RNA
cacagcccaagatagttaag

SEQ ID NO: 690 - RNA, 20 nt, synthetic construct
  source 1..20: mol_type = other RNA
cagcccaagatagttaagtg

SEQ ID NO: 691 - RNA, 20 nt, synthetic construct
  source 1..20: mol_type = other RNA
cagtaagtcaacttcaatgt

SEQ ID NO: 692 - RNA, 20 nt, synthetic construct
  source 1..20: mol_type = other RNA
catactcatctttttcagtg

SEQ ID NO: 693 - RNA, 20 nt, synthetic construct
  source 1..20: mol_type = other RNA
cgcgagcacagctaaggcca

SEQ ID NO: 694 - RNA, 20 nt, synthetic construct
  source 1..20: mol_type = other RNA
cgtgagtaaacctgaatctt

SEQ ID NO: 695 - RNA, 19 nt, synthetic construct
  source 1..19: mol_type = other RNA
ctcacgctggatagcctcc

SEQ ID NO: 696 - RNA, 20 nt, synthetic construct
  source 1..20: mol_type = other RNA
ctcaggtactccaaagattc

SEQ ID NO: 697 - RNA, 20 nt, synthetic construct
  source 1..20: mol_type = other RNA
cttaccccacttaactatct

SEQ ID NO: 698 - RNA, 20 nt, synthetic construct
  source 1..20: mol_type = other RNA
gaagttgacttactgaagaa

SEQ ID NO: 699 - RNA, 20 nt, synthetic construct
  source 1..20: mol_type = other RNA
gagtagcgcgagcacagcta

SEQ ID NO: 700 - RNA, 20 nt, synthetic construct
  source 1..20: mol_type = other RNA
gcatactcatctttttcagt

SEQ ID NO: 701 - RNA, 20 nt, synthetic construct
  source 1..20: mol_type = other RNA
gctactctctctttctggcc

SEQ ID NO: 702 - RNA, 20 nt, synthetic construct
  source 1..20: mol_type = other RNA
ggcatactcatctttttcag

SEQ ID NO: 703 - RNA, 18 nt, synthetic construct
  source 1..18: mol_type = other RNA
taccccacttaactatct

SEQ ID NO: 704 - RNA, 18 nt, synthetic construct
  source 1..18: mol_type = other RNA
tcacgctggatagcctcc

SEQ ID NO: 705 - RNA, 20 nt, synthetic construct
  source 1..20: mol_type = other RNA
tcgatctatgaaaaagacag

SEQ ID NO: 706 - RNA, 20 nt, synthetic construct
  source 1..20: mol_type = other RNA
tggagagagaattgaaaaag

SEQ ID NO: 707 - RNA, 20 nt, synthetic construct
  source 1..20: mol_type = other RNA
tggagtacctgaggaatatc

SEQ ID NO: 708 - RNA, 20 nt, synthetic construct
  source 1..20: mol_type = other RNA
tgggctgtgacaaagtcaca

SEQ ID NO: 709 - RNA, 20 nt, synthetic construct
  source 1..20: mol_type = other RNA
ttaccccacttaactatctt

SEQ ID NO: 710 - RNA, 20 nt, synthetic construct
  source 1..20: mol_type = other RNA
ttcagacttgtctttcagca

SEQ ID NO: 711 - RNA, 20 nt, synthetic construct
  source 1..20: mol_type = other RNA
tttgactttccattctctgc

SEQ ID NO: 712 - RNA, 20 nt, synthetic construct
  source 1..20: mol_type = other RNA
acacactgtggggggtgggg

SEQ ID NO: 713 - RNA, 20 nt, synthetic construct
  source 1..20: mol_type = other RNA
acacagacacgtgagtttat

SEQ ID NO: 714 - RNA, 20 nt, synthetic construct
  source 1..20: mol_type = other RNA
acactgtggggggtggggtg

SEQ ID NO: 715 - RNA, 20 nt, synthetic construct
  source 1..20: mol_type = other RNA
actcacctgataagaggcag

SEQ ID NO: 716 - RNA, 20 nt, synthetic construct
  source 1..20: mol_type = other RNA
cacactgtggggggtggggt

SEQ ID NO: 717 - RNA, 20 nt, synthetic construct
  source 1..20: mol_type = other RNA
ccgactgcatctttgtttca

SEQ ID NO: 718 - RNA, 20 nt, synthetic construct
  source 1..20: mol_type = other RNA
cgttacctcatagtctgggt

SEQ ID NO: 719 - RNA, 20 nt, synthetic construct
  source 1..20: mol_type = other RNA
ctggattacctcttgccctc

SEQ ID NO: 720 - RNA, 20 nt, synthetic construct
  source 1..20: mol_type = other RNA
gttacctcatagtctgggtt

SEQ ID NO: 721 - RNA, 20 nt, synthetic construct
  source 1..20: mol_type = other RNA
taccacctgaaaatgaaaaa

SEQ ID NO: 722 - RNA, 20 nt, synthetic construct
  source 1..20: mol_type = other RNA
tatatgctggggagaaagaa

SEQ ID NO: 723 - RNA, 20 nt, synthetic construct
  source 1..20: mol_type = other RNA
ttatatgctggggagaaaga

SEQ ID NO: 724 - RNA, 20 nt, synthetic construct
  source 1..20: mol_type = other RNA
ttgtcctgcggaggaaggag

SEQ ID NO: 725 - RNA, 20 nt, synthetic construct
  source 1..20: mol_type = other RNA
tttgtcctgcggaggaagga

SEQ ID NO: 726 - RNA, 20 nt, synthetic construct
  source 1..20: mol_type = other RNA
ttttgtcctgcggaggaagg

SEQ ID NO: 727 - RNA, 20 nt, synthetic construct
  source 1..20: mol_type = other RNA
acatacttctgtaatacact

SEQ ID NO: 728 - RNA, 20 nt, synthetic construct
  source 1..20: mol_type = other RNA
accttcaaggaaaccagttg

SEQ ID NO: 729 - RNA, 20 nt, synthetic construct
  source 1..20: mol_type = other RNA
catggaacaggggaagggcc

SEQ ID NO: 730 - RNA, 20 nt, synthetic construct
  source 1..20: mol_type = other RNA
ctcttccattgggtacataa

SEQ ID NO: 731 - RNA, 20 nt, synthetic construct
  source 1..20: mol_type = other RNA
cttcaaggtaagggcctact

SEQ ID NO: 732 - RNA, 20 nt, synthetic construct
  source 1..20: mol_type = other RNA
gaccagtacagccaccttca

SEQ ID NO: 733 - RNA, 20 nt, synthetic construct
  source 1..20: mol_type = other RNA
tctcctacctttgattgact

SEQ ID NO: 734 - RNA, 20 nt, synthetic construct
  source 1..20: mol_type = other RNA
tgaccagctctaccaggtaa

SEQ ID NO: 735 - RNA, 20 nt, synthetic construct
  source 1..20: mol_type = other RNA
tgactatcaagaagatggtt

SEQ ID NO: 736 - RNA, 20 nt, synthetic construct
  source 1..20: mol_type = other RNA
tggcccagtcaatcaaaggt

SEQ ID NO: 737 - RNA, 20 nt, synthetic construct
  source 1..20: mol_type = other RNA
ttctcctacctttgattgac

SEQ ID NO: 738 - RNA, 20 nt, synthetic construct
  source 1..20: mol_type = other RNA
tttaaaccatgtgatatttt

SEQ ID NO: 739 - RNA, 20 nt, synthetic construct
  source 1..20: mol_type = other RNA
ccctacctgtcaccaggacc

SEQ ID NO: 740 - RNA, 20 nt, synthetic construct
  source 1..20: mol_type = other RNA
aaaggcactgcaagagacaa

SEQ ID NO: 741 - RNA, 20 nt, synthetic construct
  source 1..20: mol_type = other RNA
acactcactccatcacccgg

SEQ ID NO: 742 - RNA, 20 nt, synthetic construct
  source 1..20: mol_type = other RNA
acatcaaagtaccctacagg

SEQ ID NO: 743 - RNA, 20 nt, synthetic construct
  source 1..20: mol_type = other RNA
accggctctgcaaaggccag

SEQ ID NO: 744 - RNA, 20 nt, synthetic construct
  source 1..20: mol_type = other RNA
acctcccgagcaaacatgac

SEQ ID NO: 745 - RNA, 20 nt, synthetic construct
  source 1..20: mol_type = other RNA
actggaccagtatgtcttcc

SEQ ID NO: 746 - RNA, 20 nt, synthetic construct
  source 1..20: mol_type = other RNA
agactcagaggtgagaggag

SEQ ID NO: 747 - RNA, 20 nt, synthetic construct
  source 1..20: mol_type = other RNA
agccaagtaccccctcccag

SEQ ID NO: 748 - RNA, 20 nt, synthetic construct
  source 1..20: mol_type = other RNA
agccccaaggtaaaaaggcc

SEQ ID NO: 749 - RNA, 20 nt, synthetic construct
  source 1..20: mol_type = other RNA
agcctaggaggcaaagagca

SEQ ID NO: 750 - RNA, 20 nt, synthetic construct
  source 1..20: mol_type = other RNA
aggccattttggaagcttgt

SEQ ID NO: 751 - RNA, 20 nt, synthetic construct
  source 1..20: mol_type = other RNA
aggctgcaggtggaatcaga

SEQ ID NO: 752 - RNA, 20 nt, synthetic construct
  source 1..20: mol_type = other RNA
cacatcctgcaaggggggat

SEQ ID NO: 753 - RNA, 20 nt, synthetic construct
  source 1..20: mol_type = other RNA
cactcaccttagcctgagca

SEQ ID NO: 754 - RNA, 20 nt, synthetic construct
  source 1..20: mol_type = other RNA
cactcactccatcacccgga

SEQ ID NO: 755 - RNA, 20 nt, synthetic construct
  source 1..20: mol_type = other RNA
cactcacttgagggtttcca

SEQ ID NO: 756 - RNA, 20 nt, synthetic construct
  source 1..20: mol_type = other RNA
cagacatcaaagtaccctac

SEQ ID NO: 757 - RNA, 20 nt, synthetic construct
  source 1..20: mol_type = other RNA
cagactgcggggacacagtg

SEQ ID NO: 758 - RNA, 20 nt, synthetic construct
  source 1..20: mol_type = other RNA
cagctcacagtgtgccacca

SEQ ID NO: 759 - RNA, 20 nt, synthetic construct
  source 1..20: mol_type = other RNA
ccacatcctgcaagggggga

SEQ ID NO: 760 - RNA, 20 nt, synthetic construct
  source 1..20: mol_type = other RNA
ccactcaccttagcctgagc

SEQ ID NO: 761 - RNA, 20 nt, synthetic construct
  source 1..20: mol_type = other RNA
cccacccaatgcccggcagc

SEQ ID NO: 762 - RNA, 20 nt, synthetic construct
  source 1..20: mol_type = other RNA
cccccaggctttccccaaac

SEQ ID NO: 763 - RNA, 20 nt, synthetic construct
  source 1..20: mol_type = other RNA
cctcctgcaatgcttcctgg

SEQ ID NO: 764 - RNA, 20 nt, synthetic construct
  source 1..20: mol_type = other RNA
cctggtccagagcctgagca

SEQ ID NO: 765 - RNA, 20 nt, synthetic construct
  source 1..20: mol_type = other RNA
ccttacctgtcatgtttgct

SEQ ID NO: 766 - RNA, 20 nt, synthetic construct
  source 1..20: mol_type = other RNA
cgcccaggtcctcacgtctg

SEQ ID NO: 767 - RNA, 20 nt, synthetic construct
  source 1..20: mol_type = other RNA
cgtccagtacaacaagttca

SEQ ID NO: 768 - RNA, 20 nt, synthetic construct
  source 1..20: mol_type = other RNA
ctctggcaaatctctgaggc

SEQ ID NO: 769 - RNA, 20 nt, synthetic construct
  source 1..20: mol_type = other RNA
ctgccaaattccagcctcct

SEQ ID NO: 770 - RNA, 20 nt, synthetic construct
  source 1..20: mol_type = other RNA
ctggtcagggcaagagctat

SEQ ID NO: 771 - RNA, 20 nt, synthetic construct
  source 1..20: mol_type = other RNA
cttagtccaacacccaccgc

SEQ ID NO: 772 - RNA, 20 nt, synthetic construct
  source 1..20: mol_type = other RNA
cttcccccagctgaagtcct

SEQ ID NO: 773 - RNA, 20 nt, synthetic construct
  source 1..20: mol_type = other RNA
gaacggcagctggcccaagg

SEQ ID NO: 774 - RNA, 20 nt, synthetic construct
  source 1..20: mol_type = other RNA
gacacgagtgattgctgtgc

SEQ ID NO: 775 - RNA, 20 nt, synthetic construct
  source 1..20: mol_type = other RNA
gaccagattcccagtatgtt

SEQ ID NO: 776 - RNA, 20 nt, synthetic construct
  source 1..20: mol_type = other RNA
gagccagccacagggccccc

SEQ ID NO: 777 - RNA, 20 nt, synthetic construct
  source 1..20: mol_type = other RNA
gagccccaaggtaaaaaggc

SEQ ID NO: 778 - RNA, 20 nt, synthetic construct
  source 1..20: mol_type = other RNA
gcgtccacatcctgcaaggg

SEQ ID NO: 779 - RNA, 20 nt, synthetic construct
  source 1..20: mol_type = other RNA
ggaagcagaaggtgcttgcg

SEQ ID NO: 780 - RNA, 20 nt, synthetic construct
  source 1..20: mol_type = other RNA
ggcccaaggaggcctggctg

SEQ ID NO: 781 - RNA, 20 nt, synthetic construct
  source 1..20: mol_type = other RNA
ggcgggccaagacttctccc

SEQ ID NO: 782 - RNA, 20 nt, synthetic construct
  source 1..20: mol_type = other RNA
ggcgtccacatcctgcaagg

SEQ ID NO: 783 - RNA, 20 nt, synthetic construct
  source 1..20: mol_type = other RNA
ggctgcagccggggacactg

SEQ ID NO: 784 - RNA, 20 nt, synthetic construct
  source 1..20: mol_type = other RNA
gggcccacagccactcgtgg

SEQ ID NO: 785 - RNA, 20 nt, synthetic construct
  source 1..20: mol_type = other RNA
gggcgtccacatcctgcaag

SEQ ID NO: 786 - RNA, 20 nt, synthetic construct
  source 1..20: mol_type = other RNA
gtacaagctgtcggaaacag

SEQ ID NO: 787 - RNA, 20 nt, synthetic construct
  source 1..20: mol_type = other RNA
taacatactgggaatctggt

SEQ ID NO: 788 - RNA, 20 nt, synthetic construct
  source 1..20: mol_type = other RNA
tatgaccagatggacctggc

SEQ ID NO: 789 - RNA, 20 nt, synthetic construct
  source 1..20: mol_type = other RNA
tcactccagatgctgcaggg

SEQ ID NO: 790 - RNA, 20 nt, synthetic construct
  source 1..20: mol_type = other RNA
tgctctggagatggagaagc

SEQ ID NO: 791 - RNA, 20 nt, synthetic construct
  source 1..20: mol_type = other RNA
tgggcgtccacatcctgcaa

SEQ ID NO: 792 - RNA, 20 nt, synthetic construct
  source 1..20: mol_type = other RNA
tggtgcaggccaggctggag

SEQ ID NO: 793 - RNA, 20 nt, synthetic construct
  source 1..20: mol_type = other RNA
tgtcttccaggactcccagc

SEQ ID NO: 794 - RNA, 20 nt, synthetic construct
  source 1..20: mol_type = other RNA
ttcaaccaggagccagcctc

SEQ ID NO: 795 - RNA, 20 nt, synthetic construct
  source 1..20: mol_type = other RNA
ttccagaagaagctgctccg

SEQ ID NO: 796 - RNA, 20 nt, synthetic construct
  source 1..20: mol_type = other RNA
ttttaccttggggctctgac

SEQ ID NO: 797 - RNA, 20 nt, synthetic construct
  source 1..20: mol_type = other RNA
acgactggccagggcgcctg

SEQ ID NO: 798 - RNA, 20 nt, synthetic construct
  source 1..20: mol_type = other RNA
cacctacctaagaaccatcc

SEQ ID NO: 799 - RNA, 20 nt, synthetic construct
  source 1..20: mol_type = other RNA
ggacccagactagcagcacc

SEQ ID NO: 800 - RNA, 20 nt, synthetic construct
  source 1..20: mol_type = other RNA
ggagtctgagagatggagag

SEQ ID NO: 801 - RNA, 20 nt, synthetic construct
  source 1..20: mol_type = other RNA
ggggttccagggcctgtctg

SEQ ID NO: 802 - RNA, 20 nt, synthetic construct
  source 1..20: mol_type = other RNA
cctccttctttgaggagaaa

SEQ ID NO: 803 - RNA, 20 nt, synthetic construct
  source 1..20: mol_type = other RNA
ccagtggcgagagaagaccc

SEQ ID NO: 804 - RNA, 20 nt, synthetic construct
  source 1..20: mol_type = other RNA
tgcccagccactgaggcctg

SEQ ID NO: 805 - RNA, 20 nt, synthetic construct
  source 1..20: mol_type = other RNA
cgactggccagggcgcctgt

SEQ ID NO: 806 - RNA, 20 nt, synthetic construct
  source 1..20: mol_type = other RNA
accgcccagacgactggcca

SEQ ID NO: 807 - RNA, 20 nt, synthetic construct
  source 1..20: mol_type = other RNA
caccgcccagacgactggcc

SEQ ID NO: 808 - RNA, 20 nt, synthetic construct
  source 1..20: mol_type = other RNA
ttctctctggaagggcacaa

SEQ ID NO: 809 - RNA, 20 nt, synthetic construct
  source 1..20: mol_type = other RNA
ctacaactgggctggcggcc

SEQ ID NO: 810 - RNA, 20 nt, synthetic construct
  source 1..20: mol_type = other RNA
gacgttacctcgtgcggccc

SEQ ID NO: 811 - RNA, 20 nt, synthetic construct
  source 1..20: mol_type = other RNA
cagcaaccagacggacaagc

SEQ ID NO: 812 - RNA, 20 nt, synthetic construct
  source 1..20: mol_type = other RNA
cctgcagagaaacacacttg

SEQ ID NO: 813 - RNA, 20 nt, synthetic construct
  source 1..20: mol_type = other RNA
cagttccaaaccctggtggt

SEQ ID NO: 814 - RNA, 20 nt, synthetic construct
  source 1..20: mol_type = other RNA
gtgtcacacaactgcccaac

SEQ ID NO: 815 - RNA, 20 nt, synthetic construct
  source 1..20: mol_type = other RNA
agccggccagttccaaaccc

SEQ ID NO: 816 - RNA, 20 nt, synthetic construct
  source 1..20: mol_type = other RNA
cggccagttccaaaccctgg

SEQ ID NO: 817 - RNA, 20 nt, synthetic construct
  source 1..20: mol_type = other RNA
tccctgcagagaaacacact

SEQ ID NO: 818 - RNA, 20 nt, synthetic construct
  source 1..20: mol_type = other RNA
gagactcaccaggggctggc

SEQ ID NO: 819 - RNA, 20 nt, synthetic construct
  source 1..20: mol_type = other RNA
ccagccaagtacgtaagtag

SEQ ID NO: 820 - RNA, 20 nt, synthetic construct
  source 1..20: mol_type = other RNA
ctggatatctgtgggacaag

SEQ ID NO: 821 - RNA, 20 nt, synthetic construct
  source 1..20: mol_type = other RNA
cttacctgggctggggaaga

SEQ ID NO: 822 - RNA, 20 nt, synthetic construct
  source 1..20: mol_type = other RNA
gctacaaacaagctcatctt

SEQ ID NO: 823 - RNA, 20 nt, synthetic construct
  source 1..20: mol_type = other RNA
ttcaaaacctgtcagtgatt

SEQ ID NO: 824 - RNA, 20 nt, synthetic construct
  source 1..20: mol_type = other RNA
ttcgtatctgtaaaaccaag

SEQ ID NO: 825 - RNA, 20 nt, synthetic construct
  source 1..20: mol_type = other RNA
tttcaaaacctgtcagtgat

SEQ ID NO: 826 - protein, 1142 aa, Homo sapiens
MDQMGKMRPQPYGGTNPYSQQQGPPSDPQQGHGYPGQPYGSQTPQRYPMTVQGRAQSAMGGLSYTQQIPPYGQQGPSGYGQQGQTPYYNQQSPHPQQQQPPYSQQPPSQTPHAQPSYQQQPQSQPPQLQSSQPPYSQQPSQPPHQQSPAPYPSQQSTTQQHPQSQPPYSQPQAQSPYQQQQPQQPAPSTLSQQAAYPQPQSQQSQQTAYSQQRFPPPQELSQDSFGSQASSAPSMTSSKGGQEDMNLSLQSRPSSLPDLSGSIDDLPMGTEGALSPGVSTSGISSSQGEQSNPAQSPFSPHTSPHLPGIRGPSPSPVGSPASVAQSRSGPLSPAAVPGNQMPPRPPSGSSDSIMHPSMNQSSIAQDRGYMQRNSQMPQYSSPQPGSALSPRQLSGGQIHTGMGSYQQNSMGSYGPQGGQYGPQGGYPRQPNYNALPNANYPSAGMAGGINPMGAGGQMHGQPGIPPYGTLPPGRMSHASMGNRPYGPNNGQYATSGWVRDVSPPGGMNRKTQETAVAMHVAANSIQNRPPGYPNMNQGGMMGTGPPYGQGINSMAGMINPQGPPYSMGGTMANNSAGMAASPEMMGLGDVKLTPATKMNNKADGTPKTESKSKKSSSSTTTNEKITKLYELGGGPERKMWVDRYLAFTEEKAMGMTNLPAVGRKPLDLYRLYVSVKEIGGLTQVNKNKKWRELATNLNVGTSSSAASSLKKQYIQCLYAFECKIERGEDPPPDIFAAADSKKSQPKIQPPSPAGSGSMQGPQTPQSTSSSMAEGGDLKPPTPASTPHSQIPPLPGMSRSNSVGIQDAFNDGSDSTFQKRNSMTPNPGYQPSMNTSDMMGRMSYEPNKDPYGSMRKAPGSDPFMSSGQGPNGGMGDPYSRAAGPGLGNVAMGPRQHYPYGGPYDRVRTEPGIGPEGNMSTGAPQSNLMPSNPDSGMYSPSRYPPQQQQQQQQRHDSYGNQFSTQGTPSGSPFPSQQTTMYQQQQQNYKRPMDGTYGPPAKRHEGEMYSVPYSTGQGLPQQQQLPPAQPQPASQPQAAQPSPQQDVYNQYGNAYPATATAATERRPAGGPQNQFPFQFGRDRVSAPPGTNAQQNMPPQMMGGPIQASAEVAQQGTMWQGRNDMTYNYANRQSTALPPRAPPIMA

SEQ ID NO: 827 - DNA, 3429 bp, Homo sapiens
  source 1..3429: mol_type = other DNA
atggatcagatgggcaagatgagacctcagccatatggcgggactaacccatactcgcagcaacagggacctccgtcagacccgcagcaaggacatgggtacccagggcagccatacgggtcccagaccccgcagcggtacccgatgaccgtgcagggccgggcgcagagtgccatgggcggcctctcttatacacagcagattcctccttatggacaacaaggccccagcgggtatggtcaacagggccagactccatattacaaccagcaaagtcctcaccctcagcagcagcagccaccctactcccagcaaccaccgtcccagacccctcatgcccaaccttcgtatcagcagcagccacagtctcaaccaccacagctccagtcctctcagcctccatactcccagcagccatcccagcctccacatcagcagtccccggctccatacccctcccagcagtcgacgacacagcagcacccccagagccagcccccctactcacagccacaggctcagtctccttaccagcagcagcaacctcagcagccagcaccctcgacgctctcccagcaggctgcgtatcctcagccccagtctcagcagtcccagcaaactgcctattcccagcagcgcttccctccaccgcaggagctatctcaagattcatttgggtctcaggcatcctcagccccctcaatgacctccagtaagggagggcaagaagatatgaacctgagccttcagtcaagaccctccagcttgcctgatctatctggttcaatagatgacctccccatggggacagaaggagctctgagtcctggagtgagcacatcagggatttccagcagccaaggagagcagagtaatccagctcagtctcctttctctcctcatacctcccctcacctgcctggcatccgaggcccttccccgtcccctgttggctctcccgccagtgttgctcagtctcgctcaggaccactctcgcctgctgcagtgccaggcaaccagatgccacctcggccacccagtggcagttcggacagcatcatgcatccttccatgaaccaatcaagcattgcccaagatcgaggttatatgcagaggaactcccagatgccccagtacagttccccccagcccggctcagccttatctccgcgtcagctttccggaggacagatacacacaggcatgggctcctaccagcagaactccatggggagctatggtccccaggggggtcagtatggcccacaaggtggctaccccaggcagccaaactataatgccttgcccaatgccaactaccccagtgcaggcatggctggaggcataaaccccatgggtgccggaggtcaaatgcatggacagcctggcatcccaccttatggcacactccctccagggaggatgagtcacgcctccatgggcaaccggccttatggccctaacaatggccaatatgccacctcaggttgggtcagggatgtgtccccaccagggggcatgaaccggaaaacccaagaaactgctgtcgccatgcatgttgctgccaactctatccaaaacaggccgccaggctaccccaatatgaatcaagggggcatgatgggaactggacctccttatggacaagggattaatagtatggctggcatgatcaaccctcagggacccccatattccatgggtggaaccatggccaacaattctgcagggatggcagccagcccagagatgatgggccttggggatgtaaagttaactccagccaccaaaatgaacaacaaggcagatgggacacccaagacagaatccaaatccaagaaatccagttcttctactacaaccaatgagaagatcaccaagttgtatgagctgggtggtgggcctgagaggaagatgtgggtggaccgttatctggccttcactgaggagaaggccatgggcatgacaaatctgcctgctgtgggtaggaaacctctggacctctatcgcctctatgtgtctgtgaaggagattggtggattgactcaggtcaacaagaacaaaaaatggcgggaacttgcaaccaacctcaatgtgggcacatcaagcagtgctgccagctccttgaaaaagcagtatatccagtgtctctatgcctttgaatgcaagattgaacggggagaagaccctcccccagacatctttgcagctgctgattccaagaagtcccagcccaagatccagcctccctctcctgcgggatcaggatctatgcaggggccccagactccccagtcaaccagcagttccatggcagaaggaggagacttaaagccaccaactccagcatccacaccacacagtcagatccccccattgccaggcatgagcaggagcaattcagttgggatccaggatgcctttaatgatggaagtgactccacattccagaagcggaattccatgactccaaaccctgggtatcagcccagtatgaatacctctgacatgatggggcgcatgtcctatgagccaaataaggatccttatggcagcatgaggaaagctccagggagtgatcccttcatgtcctcagggcagggccccaacggcgggatgggtgacccctacagtcgtgctgccggccctgggctaggaaatgtggcgatgggaccacgacagcactatccctatggaggtccttatgacagagtgaggacggagcctggaatagggcctgagggaaacatgagcactggggccccacagtcgaatctcatgccttccaacccagactcggggatgtattctcctagccgctaccccccgcagcagcagcagcagcagcagcaacgacatgattcctatggcaatcagttctccacccaaggcaccccttctggcagccccttccccagccagcagactacaatgtatcaacagcaacagcagaattacaagcggccaatggatggcacatatggccctcctgccaagcggcacgaaggggagatgtacagcgtgccatacagcactgggcaggggctgcctcagcagcagcagttgcccccagcccagccccagcctgccagccagccacaagctgcccagccttcccctcagcaagatgtatacaaccagtatggcaatgcctatcctgccactgccacagctgctactgagcgccgaccagcaggcggcccccagaaccaatttccattccagtttggccgagaccgtgtctctgcaccccctggcaccaatgcccagcaaaacatgccaccacaaatgatgggcggccccatacaggcatcagctgaggttgctcagcaaggcaccatgtggcaggggcgtaatgacatgacctataattatgccaacaggcagagcacggctctgccccccagggccccgcctatcatggcgtga

SEQ ID NO: 828 - protein, 125 aa, Homo sapiens
MPHSSDSSDSSFSRSPPPGKQDSSDDVRRVQRREKNRIAAQKSRQRQTQKADTLHLESEDLEKQNAALRKEIKQLTEELKYFTSVLNSHEPLCSVLAASTPSPPEVVYSAHAFHQPHVSSPRFQP

SEQ ID NO: 829 - DNA, 378 bp, Homo sapiens
  source 1..378: mol_type = other DNA
atgcctcacagctccgacagcagtgactccagcttcagccgctctcctccccctggcaaacaggactcatctgatgatgtgagaagagttcagaggagggagaaaaatcgtattgccgcccagaagagccgacagaggcagacacagaaggccgacaccctgcacctggagagcgaagacctggagaaacagaacgcggctctacgcaaggagatcaagcagctcacagaggaactgaagtacttcacgtcggtgctgaacagccacgagcccctgtgctcggtgctggccgccagcacgccctcgccccccgaggtggtgtacagcgcccacgcattccaccaacctcatgtcagctccccgcgcttccagccctga

SEQ ID NO: 830 - protein, 486 aa, Homo sapiens
MALPVTALLLPLALLLHAARPDIQMTQTTSSLSASLGDRVTISCRASQDISKYLNWYQQKPDGTVKLLIYHTSRLHSGVPSRFSGSGSGTDYSLTISNLEQEDIATYFCQQGNTLPYTFGGGTKLEITGGGGSGGGGSGGGGSEVKLQESGPGLVAPSQSLSVTCTVSGVSLPDYGVSWIRQPPRKGLEWLGVIWGSETTYYNSALKSRLTIIKDNSKSQVFLKMNSLQTDDTAIYYCAKHYYYGGSYAMDYWGQGTSVTVSSTTTPAPRPPTPAPTIASQPLSLRPEACRPAAGGAVHTRGLDFACDIYIWAPLAGTCGVLLLSLVITLYCKRGRKKLLYIFKQPFMRPVQTTQEEDGCSCRFPEEEEGGCELRVKFSRSADAPAYQQGQNQLYNELNLGRREEYDVLDKRRGRDPEMGGKPRRKNPQEGLYNELQKDKMAEAYSEIGMKGERRRGKGHDGLYQGLSTATKDTYDALHMQALPPR

SEQ ID NO: 831 - protein, 865 aa, synthetic construct
MALPVTALLLPLALLLHAARPDIQMTQTTSSLSASLGDRVTISCRASQDISKYLNWYQQKPDGTVKLLIYHTSRLHSGVPSRFSGSGSGTDYSLTISNLEQEDIATYFCQQGNTLPYTFGGGTKLEITGGGGSGGGGSGGGGSEVKLQESGPGLVAPSQSLSVTCTVSGVSLPDYGVSWIRQPPRKGLEWLGVIWGSETTYYNSALKSRLTIIKDNSKSQVFLKMNSLQTDDTAIYYCAKHYYYGGSYAMDYWGQGTSVTVSSTTTPAPRPPTPAPTIASQPLSLRPEACRPAAGGAVHTRGLDFACDIYIWAPLAGTCGVLLLSLVITLYCKRGRKKLLYIFKQPFMRPVQTTQEEDGCSCRFPEEEEGGCELRVKFSRSADAPAYQQGQNQLYNELNLGRREEYDVLDKRRGRDPEMGGKPRRKNPQEGLYNELQKDKMAEAYSEIGMKGERRRGKGHDGLYQGLSTATKDTYDALHMQALPPRGSGEGRGSLLTCGDVEENPGPMALPVTALLLPLALLLHAARPGSRKVCNGIGIGEFKDSLSINATNIKHFKNCTSISGDLHILPVAFRGDSFTHTPPLDPQELDILKTVKEITGFLLIQAWPENRTDLHAFENLEIIRGRTKQHGQFSLAVVSLNITSLGLRSLKEISDGDVIISGNKNLCYANTINWKKLFGTSGQKTKIISNRGENSCKATGQVCHALCSPEGCWGPEPRDCVSCRNVSRGRECVDKCNLLEGEPREFVENSECIQCHPECLPQAMNITCTGRGPDNCIQCAHYIDGPHCVKTCPAGVMGENNTLVWKYADAGHVCHLCHPNCTYGCTGPGLEGCPTNGPKIPSIATGMVGALLLLLVVALGIGLFM

SEQ ID NO: 832 - DNA, 1458 bp, synthetic construct
  source 1..1458: mol_type = other DNA
atggccctgcccgttaccgccctactcctgcccctggccctcctgctccacgccgccaggcccgacatccagatgacccagaccaccagcagcctgtccgccagcctgggggacagggtgaccatctcctgtcgggcctctcaggacatcagcaagtacctgaattggtaccagcagaagcctgacggcaccgtgaagctgctgatctaccacaccagccggctgcactccggcgtgcccagccggttcagcggcagcgggtcaggcaccgactacagcctgaccatctccaacctggagcaggaggacatcgccacctacttctgccagcaggggaacaccctgccatacacctttggcgggggcaccaagctggagatcaccgggggcggcgggagcggcggcggcgggtccgggggcggcggctccgaggtgaagctgcaggagtccggccccggactggtcgccccctcccagagcctgtccgtgacatgcaccgtgtccggcgtgagcctgcccgactacggcgtgtcatggatcaggcagcccccccggaaggggctggagtggctgggggtgatctgggggagcgagaccacttactacaacagtgctctcaagagcaggctgaccatcatcaaggacaacagcaagagccaggtgttcctgaagatgaacagcctgcagaccgatgacaccgccatctactactgtgccaagcactactactatggcggcagctacgccatggactactgggggcaggggacaagcgtgactgtgagcagcaccaccacccctgcccccaggccccccacccccgcccccaccatcgccagccagcccctgtccctgcggcccgaggcctgccggcccgccgccggcggcgccgtgcacacccggggcctggacttcgcctgcgacatctacatctgggcccccctggccggaacctgcggcgtgctgctgctgtccctggtgatcaccctgtactgcaagcggggccggaagaagctgctgtacatcttcaagcagcccttcatgcgccccgtgcagaccacccaggaggaggacggctgcagctgcaggttccccgaggaggaggaggggggctgcgagctgcgggtgaagttcagcaggagcgccgacgcccctgcttaccagcagggccagaatcagctgtacaacgagctgaatctgggccggagggaggagtacgacgtgctggacaagcggaggggcagggaccccgagatgggcggcaagcccaggcggaagaacccccaggaggggctgtacaacgagctgcagaaggacaagatggccgaggcctactccgagatcggcatgaagggcgagaggcggagaggcaagggccatgacggcctgtaccagggcctgtccaccgccaccaaggacacctacgacgccctgcacatgcaggccctgcccccccgc

SEQ ID NO: 833 - DNA, 2595 bp, synthetic construct
  source 1..2595: mol_type = other DNA
atggccctgcccgttaccgccctactcctgcccctggccctcctgctccacgccgccaggcccgacatccagatgacccagaccaccagcagcctgtccgccagcctgggggacagggtgaccatctcctgtcgggcctctcaggacatcagcaagtacctgaattggtaccagcagaagcctgacggcaccgtgaagctgctgatctaccacaccagccggctgcactccggcgtgcccagccggttcagcggcagcgggtcaggcaccgactacagcctgaccatctccaacctggagcaggaggacatcgccacctacttctgccagcaggggaacaccctgccatacacctttggcgggggcaccaagctggagatcaccgggggcggcgggagcggcggcggcgggtccgggggcggcggctccgaggtgaagctgcaggagtccggccccggactggtcgccccctcccagagcctgtccgtgacatgcaccgtgtccggcgtgagcctgcccgactacggcgtgtcatggatcaggcagcccccccggaaggggctggagtggctgggggtgatctgggggagcgagaccacttactacaacagtgctctcaagagcaggctgaccatcatcaaggacaacagcaagagccaggtgttcctgaagatgaacagcctgcagaccgatgacaccgccatctactactgtgccaagcactactactatggcggcagctacgccatggactactgggggcaggggacaagcgtgactgtgagcagcaccaccacccctgcccccaggccccccacccccgcccccaccatcgccagccagcccctgtccctgcggcccgaggcctgccggcccgccgccggcggcgccgtgcacacccggggcctggacttcgcctgcgacatctacatctgggcccccctggccggaacctgcggcgtgctgctgctgtccctggtgatcaccctgtactgcaagcggggccggaagaagctgctgtacatcttcaagcagcccttcatgcgccccgtgcagaccacccaggaggaggacggctgcagctgcaggttccccgaggaggaggaggggggctgcgagctgcgggtgaagttcagcaggagcgccgacgcccctgcttaccagcagggccagaatcagctgtacaacgagctgaatctgggccggagggaggagtacgacgtgctggacaagcggaggggcagggaccccgagatgggcggcaagcccaggcggaagaacccccaggaggggctgtacaacgagctgcagaaggacaagatggccgaggcctactccgagatcggcatgaagggcgagaggcggagaggcaagggccatgacggcctgtaccagggcctgtccaccgccaccaaggacacctacgacgccctgcacatgcaggccctgcccccccgcggcagcggagagggcagaggaagtcttctaacatgcggtgacgtggaggagaatcccggccctatggccctgcctgtgacagctctgctgcttcctctggcactgctgctgcatgctgccagaccaggcagcagaaaagtgtgcaacggcatcggcatcggagagttcaaggacagcctgagcatcaacgccaccaacatcaagcacttcaagaactgcaccagcatcagcggcgacctgcacattctgcctgtggcctttagaggcgacagcttcacccacacacctccactcgatccccaggagctggacatcctgaaaaccgtgaaagagatcaccggctttctgctgatccaggcttggcccgagaaccggacagatctgcacgccttcgagaacctggaaatcatcagaggccggaccaagcagcacggccagttttctctggctgtggtgtccctgaacatcaccagcctgggcctgagaagcctgaaagaaatcagcgacggcgacgtgatcatctccggcaacaagaacctgtgctacgccaacaccatcaactggaagaagctgttcggcaccagcggccagaaaacaaagatcatcagcaaccggggcgagaacagctgcaaggctacaggccaagtgtgccacgctctgtgtagccctgaaggctgttggggacccgagcctagagattgcgtgtcctgcagaaacgtgtcccggggcagagaatgcgtggacaagtgcaatctgctggaaggcgagccccgcgagttcgtggaaaacagcgagtgcatccagtgtcaccccgagtgtctgccccaggccatgaacattacctgtaccggcagaggccccgacaactgtattcagtgcgcccactacatcgacggccctcactgcgtgaaaacatgtcctgctggcgtgatgggagagaacaacaccctcgtgtggaagtatgccgacgccggacatgtgtgccacctgtgtcaccctaattgcacctacggctgtacaggccctggcctggaaggctgtccaacaaacggacctaagatcccctctatcgccaccggcatggttggagccttgctgcttctgctggtggtggcccttggcatcggcctgtttatg

SEQ ID NO: 834 - DNA, 32767 bp, Homo sapiens
  source 1..32767: mol_type = other DNA
gcggcgggaacgtgtgggggcaacaacctggcgctccagcgattctccacgccttagttaggaatctaagcaaaccctcgctagggtccctgggcttaagacgacttctcccacaaggattgggtggaggaaggagccgagcccgatcttctgtttgtttgttgagttttgtatttcagacatttaggggaagcaaattgcgagaaaggaagggctgtcttccctgcaaacgtttccctctcctagcaaaccctccaggcctcggttccacattttgcagttgactctctggattttaataggttgttcccttgtcctcgggcccaatccatgcacgctgtgcagccggataaaatgggagcacatcctctgccattttcagccggtttgtcctggcagccctgcccccttccttggctgctctgccgctggagttaatacgcccagaaactccgcctgatcctccaggcctcaaatccagtccgcgtttgctaagtgccgtgcggtcggggacggcgataagaactctcctgtgagggagagctagcgagactttagtccggtttccatgtcaacgattcagtccatatttgccatcaggctgttggccgaggtgctttcgcgagggtagcgctgtcctagtcctagttctccaatctgcgccgggattcctgagctgcctgggtgtggggttaaaaggcaggggccgtgggggaaaaaactccaccgaagggaggacccactgcccccagccggggtctcgctgctcgggccagccacgtgcccagctcctcccctcccccgctttcccgttgccactgcccctagggaaagctgatgggccagtttctaaaaaagttccctcagcccaacatttcctgggatcgtggtgtggggctctaaaagtaaaagtggaagagaaccctagtgaattaaaaaaaaaaaaaagtagagaaattccacattatctcctccaacccaggtggatagatttttgtgcactttaccttattgctagagaaaaatggtgactgttttcaaaacagcttgcccacgtgtagggaaggagatttttggcgctttccatatttcacagccattgaagaaaggggatgagggctttctttggagagaaatccattctagcttccagattttcactgggctccaggtttcccattacaccccagctctaaggaaaatggcagagtaatggcatgtaaaaaaatcctcatttgtgtgcaggactcaggactgtttgccagctcaggggcagttgattaaatagccaagctctatttatgaggcagcctataatttggtttctaggacctaatgcaccggggagagttgttgcccctgaggactgtgagtgaaaagagggcactggcccataccagtcagtcggatcttcttggtaggctggtttggttcttggcttgaggccgggggaggggagaagaataaaactgtgggattttttttttttttaaatctcatcactcttagattaacaggaaggttttgcctttctggtgtaggatgcagtaagttttcttggggagagaaatgagttcaggctttggaattattcatagtgaccagggacattgccagcactcccgggtcctgcataatctaagataatgctcctgtggccatgaagtctccctttacaaaatctgagggggaaaagagatcctggtgtctaggaacactggcctgggcctttcccaaggcagccttgggtctggtgaggagctggaatcccctctggcttttgtagcctgtcatatcagaacattccaagtcagcctgaggaagaaaaggctgctgctgggatttggtggggcctgtagatcaggagaacactggagctttctgtgtatgtcgatcttttcagataaacctggccttctacccaactccagctcaatcggggtctcttagaatgtaatggtaaactttaaacaatctttacgctacaggatagaaaacaaatctgacaagcatccattttctaagtgacttgttggactgtgccttttcttcaaggagaaaatggtttccattttctgcatctctcttctgtaatggtttgaacactcaggttcctgcagtccctggagcctcttctgtgggttttcagtattagaaggtactgtctttggagactggggctacttgtcatggtaggctaagttttcttaagagggagtgagaaacggtgtttaggttttcctgctgggtaactgttctatgctcctaaagcaacttcagtggcctccattttaagttagtggtgagatgatcagttttgacttcaaatccattttgatattctgatcccattgttgaatgtgctcacaacttgatttttttttttttaaaggcaagtagaccgaaggcagctttggtgactccacttctttttaaagtcaccctcctctgccctctgactttaagtgacaggcagttccctcccctctctttcaattctgtaaaatggggataatccggacctcatgcccccagagccttgtaaggaccggctaatgagggcaggcgagtgggaaacgaatcgtctgaacaatgatcagtcattctttcgggcttgcaaagagggtaaaaaaggttgggtctttagcggggtccgtagaaggctttgaagacgaaaagtgctgtagaggtgctaagcagcagccaacggaccgggcccgctgccagggggtcagggctgggccgaggcggccgcggtctcaggctctggccaattttgcagccgcgggtaaagttcacgctgcccgctcccctcggtacggccgggaggggacagacctggatagggacgccgggagggaggcggcgcaggctccagagatgcgcgggctccgggccgggttttctccgaagccttcggcggcggcgctgcctagcgaaagcggctgagggcctgccgccgccgcggcttgttctctcccctcctcctttgtgaagggaagggagcgagtccgttccacggcctgcgcccgctccgctctccactccgggtttgccaggcggccgcgacggcgctgggtaaaatggcagtgctgagcctcgtgtcggagtgagggggactcggaggagagtggggcgctctagccgctcagtccggccgaccgcttgctcgcccgcccgctgccgcgcagcagcctcgacccaagccgcagctggcgaggggaggcagggcgccgggctcggcccgcgctctgactctggctcccggcgccccggctgctgccgcgcgccctccagcccgcccgtcccgggtccccctccccccgctccctccctccctccccgccccctccccctcgcctccctccctccctccctcctcctttctccggcagcagaaagcggagagtcacagcggggccaggccctggggagcggagcctccaccgcccccctcattcccaggcaagggcttggggggaatgagccgggagagccgggtcccgagcctacagagccgggagcagctgagccgccggcgcctcggccgccgccgccgcctcctcctcctccgccgccgccagcccggagcctgagccggcggggcgggggggagaggagcgagcgcagcgcagcagcggagccccgcgaggcccgcccgggcgggtggggagggcagcccgggggactgggccccggggcggggtgggagggggggagaagacgaagacagggccgggtctctccgcggacgagacagcggggatcatggccgcgcaggtcgcccccgccgccgccagcagcctgggcaacccgccgccgccgccgccctcggagctgaagaaagccgagcagcagcagcgggaggaggcggggggcgaggcggcggcggcggcagcggccgagcgcggggaaatgaaggcagccgccgggcaggaaagcgagggccccgccgtggggccgccgcagccgctgggaaaggagctgcaggacggggccgagagcaatgggggtggcggcggcggcggagccggcagcggcggcgggcccggcgcggagccggacctgaagaactcgaacgggaacgcgggccctaggcccgccctgaacaataacctcacggagccgcccggcggcggcggtggcggcagcagcgatggggtgggggcgcctcctcactcagccgcggccgccttgccgcccccagcctacggcttcgggcaaccctacggccggagcccgtctgccgtcgccgccgccgcggccgccgtcttccaccaacaacatggcggacaacaaagccctggcctggcagcgctgcagagcggcggcggcgggggcctggagccctacgcggggccccagcagaactctcacgaccacggcttccccaaccaccagtacaactcctactaccccaaccgcagcgcctaccccccgcccgccccggcctacgcgctgagctccccgagaggtggcactccgggctccggcgcggcggcggctgccggctccaagccgcctccctcctccagcgcctccgcctcctcgtcgtcttcgtccttcgctcagcagcgcttcggggccatggggggaggcggcccctccgcggccggcgggggaactccccagcccaccgccacccccaccctcaaccaactgctcacgtcgcccagctcggcccggggctaccagggctaccccgggggcgactacagtggcgggccccaggacgggggcgccggcaagggcccggcggacatggcctcgcagtgttggggggctgcggcggcggcagctgcggcggcggccgcctcgggaggggcccaacaaaggagccaccacgcgcccatgagccccgggagcagcggcggcggggggcagccgctcgcccggacccctcaggtacacagctgagtggggagggggctggggcgagcgtggtcctgggggtgggtggcggctgcggtgagcgggccacagccttgggctcccctcagtcccgggcccccactgctggggagctgccattgtctggctcttctctcttaaaatggctgcctgtctgccttcctctccttccctccttcagcctttgtgttgggtttttccagaggtgtctgctcctctttttcctctcccctggtcccttcgaactccaggggtcttgatgggggtgcggggcagagtgtgcggggaagggcctggccgggggtgagggggtgagggggcgctgggggctcaggttaggagtgtaggcagtggtaggagcccaggagttgaatgaacgtttctttgctcacctgccgctcctctccgtcccccggccttcctctgggccgccccccatctgtgctttcaaagagggcccctagagctcgaggggacctcgaggggagggcaggggactgcttgggagctgctagaggccggctgcggttcacctagggcagcccggtccatctcctgtcttaggctccgccggcccagtggcctgggcttctccctggaagtgctggtaaacagctgagtgattggagtagtaagtgcagattgctttggtttgggatttgaattatggaggtaaaatccttctgtcaaagccaggagacagttggtcttaggttgacatcctatctgtgatctgattggctccccatctcctgctcttggccatttataattgcctctgatgtaatggtacaacaatcctgatgagctcataaacttttacactctgcttttctgccagtgataacccaaactatcgctgccactatctgccttttattccagagctgaaattggctgtgaccttgaggagggaggtttaagtagcaatactgtatcagcaagagcaaagcctcagacagcctgcccttgttacattgtgcccaaacaaaagaggaggcaatggcattttgcttgtaccttggatttattttgcttgttatgttttatgcagcctgaaatgaattctgtgttgtcagaacagtagctgagttttttctctacaatgggtttgctgtttgttttggttttgtgactttcctgatggtataaatgacttctttgatggctctgaagatgcatttatcttgagtaattttgacactggttgctttgcagaattgaaatgattttactgggctttttattgagtggcaaatgtgggatctttatggggggccagaaaacagtttttgttattttttttagaactgggagctttctgaggaattttatattaggttcaagcggtctgttttaaggaagactggcctcattctttgtttacatgttgaatcttgttaacactttcttttgttaattgaactttggaatagcagcttaatttaaagggaagctggtgtctttcatgatcttgagggactttctcctaaaggcttggtttggtgaaattgtttttttcctggaataacaaaaagtctagttttctgttttgtcatcagtcattttagagctttgaaatagagactggccagtttattcctttgcattttaatgtatgttccactttttttcttgtcttccaagatatgaagatacgacctagaatgacacttaagatttgcttagaaattgcaacttctgagtaccttgttacactattctatcttgttttattttgttgcttttcttccatcttcatcatgctctgtcagcagtgcttttggtcagggatattgagtattctgtggagtcatacatgttttcaaagagggggaagctccattcatcccctcccaaaccccttgcgcttttgtgctaggaggaaattttgttcacttactagctgtattcccagcccatcctagagctactttactactcttttgagctggggattttgaaattagctgtgttagatggtgggcttggagctctgtgccttgattctacatcttccatgatgttctgcatctggacaagaaatagggaaatgttacattgtttttctagtgtctggaggaaaagttttgtcttaaaagacagcatcctcttgtctctgggtcatcctatagtctgaacctctttcctctcattccccttgttttgtttggttttggctgaaaattttacttttcttgaaaactattagaataagtcatttggggtagtaagtcagggttcatttaaaagcaaaattgattggaattctgctggtttggaaatatttagtcaaaggttttaaagaaaaagccaactcttttggtataatgatttttgtttttcagtcagtaaattatggaacactttctgtgtagatgataggagaatagatacagtccctgtttggatgcctgtctgtgctgcctttggatgaattttctgatctcttttattatcactagacccacacaacatagattcctaattaatttcagctcagttgtctactccccagagacccagggaatgggctggtgagcattcagttgtgtaagagacagtgcagcttccacttctgtggactgcttcaggtgtgtggtagtagtctaggtgagggttgtaggttcagactttgttctgaatttctctttgctacttgataaacctcttttcagaccatgatgctctactcttcaacattcttaaattaaaaagtcttgctctgtctccatcttttcctggcgcagtcttagattaagaatattttgcagagacttaattaacacagctaaggtgataacgttttcatttgactctgcgcttatgaaataaagtttaggtaagtgtgtgtattgtggctatgtctttttcacaggacctgggaagatcttagacaaacttttactttattccttttcataagtagtgtatctcaagtgttgaatcccggtactgatgaaatagttttagattacttacacacatgaagttgatttaaggctttttattgggacgctttttagcaataatactttgagagtaataccagtttaccaaggtaaaaaataaaatacaataaatagtccaggaacaagttggattttattgtagaagtttggttgttagtttctactacggaaacatcaaatgatatttctgactcctgggaaacagatacaggaatcctagatttattatgggaatgcctactggcagaaattctaggctggctgaaatacaggactcttggagctctctcaagtaggagggaccaggaaaaccacactgagatggcactttagttgtgggggtttcatgtttctctactgttcatgagagagctggggtgatgaggattgagatggtggtgtgagaacagagaaagcagccaggaccaggtttggcttcttgtgtattgggccctgtgaggactttttaggttcctttctttgtgtgtgacatgagtaaccatgacaagcagcacctgctgaaacaggatgtcttggattgcattaaacattaatatgttggattgactcctgtaggtgtaatgtctacagtagaccttttgcaaagaggttagtgaacttttttagaatgagggaataggctaacaaagtaataggcagggctctttcctgttcccatccctcaaaaggttgtattgattggcttcaactctcaaaattctagaagcaactgaagcttgtaaatatggtaaaaatgtggtattcaaatatattggcaccgagtagttcttttctgccagtgagctgtaatacctggggcttgaatggagtcctgattcctgtggcttttatctctgggtttttccttgtttagattggtcattatcattactgacgcacacttacgttgttattactgatgcatacttgagttgtgtgttgcgttagtggtaaagagcacaggactcacaacaggaggaggaaggaggaggcttaggttccacatacagctccagattaagctgtgtgaccctgggcaggtcatttgctttctctatttttcattttctccctcatcaataaaatgaagttggtctgcatggccttctcactctaagatgctacatatctgtgcttccatagctggcttgttatgaaggcagctttctgtacataaatcaggggtcttgagaccatctttcttcccctggactgaaggaactcaaagctattttctcctgggattcacaggaacaagctctgaacagttgggtgccattgtggtctgtagacttttacagaaaaagctctaccagactgttgccttgaaactgttaatctgtttgtcattagtcattccacctggctggtggttttaaaacactaaatagtcgttggaaagttaggtagatttcattaaagcaagacttgaaaaatagttgcttcaggatccccaggaggcttttgcacttggggttggggtgaggaatggatattcataagttcagtgttgatattctgctgcttttggggaggggtagggagagagagggagcattaagctctccagactcctggtgtttgggcaggtctaggtctggtttgggcagttggttgtaatctgagtgcctggacttgccctgtaagttttgctgagagagaagcaaatgttcctgagactggaagaggaaaagctgcgtttcagggtcaatttcataggtgcatttgttgtttctcatcgctatggtttaaaaaactacatggtgtgctttgcacgtggtcctggaaatgctattctttctcttctccagcacacctgaatttccattctttctcttcctggcttagtagtttagaagtgtaatttaggtatattagaggaaggaagcttccctttataaaggagggaaaagggtagagggaacagtgtttgataattctgtgcttgacacagcatcttctatcgtctctgaaggaaccaaatgtttcagagctttgtgtaaatacttgctgagctgtcaatatgtacccaggaggtttctgtagtaagatgtaaactgttctatagaatgtttgacaggcaaattaataaacagttttcaagcaaagataatgctagcctcctcatgtggtggagtaaaataacattggggaaaaagacttggggataggaaaagggtagtgctggggggcagtgagtgtggagataagaagtgatctaaaaaaaaattgaaatggaaagatgctgccctggtagtgaaacctctgtggccctggctgcgtgctaagttcagggcatgtggtatcctgttaaagtcaattgcagtttcatagtgaaaatagaagtttggaaagaagatcctgactgtcaatagtaaggtaagtattaccccagacacttggcttatgagactttgaggtttaaagggtagcttggtgagattatttttggcttgggtttgcatttctggaatattagaaaggagaaaaaagatactgcaacttgagtgtgatctttatcctcaattttgctgttgtgctggggattataagtccactacccaatggcctgggtttatttatacagtttttactggacttctgtgtatcacttatgataaaattaatatgcctttacactctgttcctgggtcagtacaaagtccaaatatttggggactcactacatcttacttgaaggattatgtgagtagatacagtctttgtttttgaaattgccattttaggattaaaaacatatctgggttccttcagtgacacattctttttatggaagaagaagaagaatctatgaatattttagctgtctgtctgtggtcctcttctttggtagccttgtgagatgaccagatttgccttctcagaatgtcttttttaactagattcattgattctgacaccagttttctttataagaagtgttttttacaccagagtcctggaagtgcccttttgacttagctgtttatatagtagcagggaatatgaatgtaattatggtcctgactatgatttttaggttcagctaacttactaccaaaggctatcagcttgttttaatacaaaacacaaaaacttggattggcactgacataggttgcttaatattgcatggtcctttcccagtatgttggtagtgagggtattaggaacttcagacttattgctgagagcatagtttctaagtcagagagatcaggaaattccaatggggatgggaaatagccctatgtgattacaccagctaggtactaggaagagatttaaaaggtagaaacaatatctccttcagaggcatttagttttcttaggaaagcatgcttatgtgcacacatctggaaaacttgaaaagcaaggtttcataaatggatgtagaccacactaattatgtgagctgaaggaattagaggaaaaggttcaatcagtttggcagggttaacctgggacagcttttcagaggctttttttgtgaagctaaatgttcaagaaacttagaatactaatttgccttttcataatgctattcttaagttccatgggcttgatagaatccacattgcacatccatctccagaccagtagctgtctcagtgttccaatgactttgagaatttggactctaaccataaaactccctgaaagagtggttccagggtcttagtggttcttgtggtcaggtagagcctttggtacagactgttaagttcttggctagttcaggggcacttttctagtaaatttggatttggaaggtcatgtcaccttcagagttgtgtgccctggacagctctgtagtaatggtggttcaactttgttggtgagtctgtcttggcagagttagttgacctttcttaaaacaagagccacgaagtaagtatctgttgggactcttaggctgctatttctgaggagctgggagctgtgttcaagtcaagttgcttgtgttagaccttatattgaggttgatgggttaggtaagcctgcacatatgcagtctgcccatttattcatagaaatggcctttaatactgtttttggccgggcgcggtagctcacacctataatcccagcactttgggaggccaaggtgggaggattgcccaagcccaggaccagccttgggaccaggctattaacatagggagaccccatctttacaagacacaaaaattgctggatgtggtggtacgtgcctgtagtcgcagtttacttagaaagctgaggcaggaggattgcttgagcccaggaggttgaggctgttgtaagccatgattacgccagtgcactccagcctgggcaatggagccaagaccttgtctcaaaaaaaaaaaaaaaatttgttttttattaggttactatggccaagcagctaacaaatgctgctcaccaatgcttaatccttgtggagcctctggaatatagtgattttggtttctttacctgctggtcgatctgtggttgggccttggcacttcaccggtcaaggatcatcagtggatgcttaacagctgaagatgcatggcatgtccagtgccaggccactgtaatgcttctacctggagaaggattggttacactgctccagtacagaagtactgcagacctttttttttttttgagatggagtcttactttgtcacccagactggagtacagtggtgcaatctggctcattgcaacctctgcctcccaggttcaagcgattctcatgcctcagcctcctgagtagctgggattataggcttccaccaccatgcccggctaatttttgtatttttagtagaggtggggtttcatcatgttggccaggctggtcttgaactcccaacctcgggtgtgatccacccaccttggccttccaaagtgctggaattacaggtgtgagccaccacgcccagccttttttttttttccccccccctcaagtaatggtccatgacctgctgaaagtactggagtcttggataaacattctggtttagaaataccttttccactttttttgccttgccattttggcattttgcaaaagtgggttttcagttactcagaattgggcaccatagttaacctcctatggattacaggtgtttaggggcttgaactctgatcattcccaggttttagaggaatccaagttcgggtgaatattgacttagtagccttgagtattcttcctgaaattacccctcctctccatttaaatggatgaaattagttttttactgaatgtgaagggacatctgaatgaacttctgtttgtttttgttagtcacttgtgcatagctggaatattatcttgggacaggttgagtctatttcccagtggcttctgcattttctaagggtggactggaatgggaagaagtctaatgccaagaatgcattccaacatgctgcagagtaggaaatttgatccctaaaatgttgacttagtgttggtcatggtacatattagaaatcacccagtaatccaggacagatttttgtcaccctccaggaagttatgttgatataaatactaaggggctttgggtactgagctaagtgctctgcaggcccaaagcgctgcttgaattgctacccatatgaagaggaaatgtgccatgtgcctttttttctctcttttgcatttgggcttccttatggctttgttgcttttatgttcccaagtctgcaaagttagatattagacttcctcctcccttggcactggcagattcatgattttccatggctcatcactagcagccaagatttttgtatgcttttctctcttaaacttgttcgttttcagcttgcttgtttataggcatctctgttaaaaggaacccttcttttccccttaagatctagcaccaggggtgcttgggggttgttgtgatatcagtcaattaaaagcccatttggtgtgtgcttggtgtttttattttgctcatgttttctttgaggtcacaacgtgcttgccgggcatgagtgcctttgggcccagctgtttactctcaactgccgtgtactttgactttaagaaaagtgcaaattcagccacgtggtagagggattaaaggccacatagtgttggatgcttccttttggaagaaacagatatatctttgggctcttcttgcccagtgatttctcctgtctggggtagacattgttgctttctgttgtccttagagaacagggcagaaatgctgggaattggtttattactgtgtctctttggcaaatatgtatgtctttttctcttgccctttggacaacattctgttctggtcctaaggtgttggagttcacaggttgatctagcgttatgtgaaactcttggtaatttaggtttggataaccggcttttagtctccagatttctaacattgtgcttgtttaggaatttaggcttctaaagagaaccatattacaaagcttttggggaacaattctgtaggtagtttatctgttcttgggtcacagatcctcaccaggatcctgacttttttttttttttagacggagtcttgctctgtcacccaggctggagtgcagtgcagtggggcaatttcagctcactgcagtctccgcctcctgggttcaaggggttctcctgcctcagtctcctgagtagctgggactacaggcatgcgccaccgcggctggctaattttttttttttttttttttttttttgagatggagtcttgttctatcgcccaggctggagtccagtggtgtgatctcggctcactgcaacctccgtctcccaggttcaagtgattctcctgccacagcctcccgagtagctgggactacaggcgccttccaccacgccctgctaatttttgtatttttagtagagatggggtttcatcatgctggccaggctggtctgaaactcctgagctcgtgatctacccgtctcggcctcccaaagtgctgggattacaggcataagccaccacgcccggcctaatgtttgtatttttagtagagatggggtttcaccatgttggctaggctagtctcgaactcctgacctcaggtgatccgccggctttgacctcccaaagtgctgggattacaggcgtgagccactgtgcctggcaaggatcctgactttcaaatgatggccaccatgcatttgagtacttattatgtgctaagcattatgcttagtcctcttgatgaatttcctaatttaatcttcaaaactgtataggaggtgggttctattattaatcttcctcttttacaaatgaggaaatagagtaagataagaaatttgccctagggaaaatagctggtaaaaggtagagttgggtttgtctgacaaggtagacaaggtttgtctgactcttcaaaggtattacaatctaaaatactaactttgcttctccaaaataaattactcaggcaccaagattgtttaggacattatttttacaatagcctgaaactcttaaatggggtgaaagactgaaaagccattagttaacaatttgacatcgtgcctagagctctgtcctgtcattcccttccatcccttccacttagggttttgttgttttggatttccgatgaatggccatggcacttggtttatagctgccttgtgattccattggtgagaactggcagcatctggtcctctggtccccggtcctctctttctcaagagggatcttttggggttgagagtgagattcagcctttaagatacagtccttcacttttttttttttttttttttttttttttttttttttgagacggagtcttgcactgtcgcccaggctggattgcagtggcgtgatctcggctcactgtaacctctgcctcctgggttcaagtgattcttctgcctcagcctcctgagtagctgggattacaggtgcccaccaccacgcccaggtaattttttgtatttttagtagagatggggtttcactgtgttggtcaggctggtcctgaactcctgaccttgtgatccacctgcctcggcctcccaaagtgctgggattacaggtgcgagccaccgcacccagccagagtctttcactttgatctgagtgaaagtgacttgaattatgaaagtatatgcagagtgatattacttttccagaaacttggagcacttgctgaagaggcagggattattgtctttttttttcttttgagatggagtctttgctctgtcgcccaggctggagtgcagtggcgcgatcttggcccactgcaagctccgtctcctgggttcacgccattctcctgcctcagcctcccgagtagctgggactacaggtgcccgccaccacgcccggctaatttttttgtatttttagtagagatggggcttcaccatgttagccaggatggtctcggtctgctgatctcgtgatccgcccgcttcggcctcccaaagtgctgggattacaggtgtgagccaccgcgcccagcggattattgtcttaatttgccacttgggggaaatgaacacataaagttgagtgccacatacaaagtttcatagcagagtcatctctaaaacctaggtttaaagttctcttagggcagtatgactttaggtaagtcacttctctgaatctgtattctcaactatataatgaggaaaaatatctaccttgaagctatggtaaatattagatatgtgaaagtactattcgtttatcaaatacaattctaacatgactcctgattggtcaatcccacaactatctctcccactctccagccgtccttttcagaagcaagcctccaggagagttgataccactattcccaccttcctcctgtgcatccaccaatctacctcacattctcctcccctgcacccagcacccctggaatgctaccaccctgctccagccaggaggccagaagggtgatgtaggaagattgcagcactaccatggaagttctcaacagcacccccgacccaggaccccaggttcccactggccctgcttctcaattcaggagagatagaattgagtggttaaagctagtattggtctttaccgaattcaaaattttccctagtttttagctacatctgagttactgtaatgctttttttttttttttttttttaaactaaaatttgtttagagacagggtctttctctgtttcccaggctggagtgcagtggctatccacaggcacaatcatagcccactctcaaactcctgacctcaagcaatcttccttcctcagcctcccaagtagctgagctacaagcacatgtcactatgccagctatcagggctagcttgcttacttttttttttttttggagacagaatctcgctctgtcggccaggctgaagtgcagtggcatgatctagctcactgcaacctccgcctcctgggctcaagcaattctcctgcctcagcctcccgagtagctgggattacaggcgtgtgccaccacgcctggctaatttttgtatttttagtagagacggggtttcaccacgttggccaggctggtctggaactcctgacctcaggtaatccacccacctgggcctcccaaagtgctgggatgacagatgtgagccaccgcacccggcctatcagtgcattaaaacacacaggccgggtgcggtggctcatgcctgccatcccagcactttgggaggccaaggcgggtggatcacaaggtcaagagatcgagaccatcctggccaacatggtgaaaccccgtctctattaaaagtacaaaaattagctaggcgtggtggcggatgcctgtagtcccagctacttgggaggttgaggcaggagaatcgcttgaacctgggaggcagaggttgcagtgagccgagatcacgcttgaacctgggaggcagaggttgcagtgagccgagatcacaccattgcactccagcctgggcgacagagcgagatgccatctcaaaaaataaaataatacatacacacacacacacacacacacacacacacacaccacttgttgttccagcttgagaagtggattagtgcagtggttctcagtgtggtccctagccaccagcatcagcattactaggtcctgttaagaagcacagacccttggccagtcctatcgaatccaaaactctgtcaatatgttctaacaagtcctctaggccattctgatgaacactgaagtttgagaactactagatttatacatttacactcaactgggctgcagagtatatccagattacctgaggggctgcttctaaattataccatagattgatgttttatgtctatgtgccctcctatgaaaaaagtattaatgaatggagaaaaggttaaaatgcttgaggctaggggagtgtgttagtttgcttggactgctgtcacaaaataccatagacgaggtggcttaaacaacaaacatttactacttgaagtcctggagggtgagaagtccaagatcaaaatgctggcagatcgggttcttggtgacagtcattttcctggcatgtaggcaactgtcttctgtcttcttgccggtctaccaccccaattaatgccctcttagcctcttatgtctcttgctcttttttttttttgagacagagtctcgctttgtcacccaggctggagtgcagtggtgcaatctcagctcattgcaacctccgcctcctgggttcaagcaattttcctgcctcagcctctcgtagctgggattacaggtccacgccaccacgcccggctaattttatttatttatttatatatattttttagtagagacgagatttcaccatgttggccatgcaagtctcaaactcctgacctcaagccatttgtccacctcagcctcccaaagtgttgggattacagacgtgagccagcgcccccggctcttgctcttataagggcactaagcccatcatgggggcacaccctcatgacttaatctaaccctaattacctcccaaaggccccacctcctattaataataccgtaacgttggaggttagggcttcaacattaatttcagggtttcataaacattcagccagtaacaggagaagaaagaaaatacttttgagatggacctttactagtgcagtgataagttctagtcacaaaacacgtctgcttgtttataggacttgggggctccctgccttccatttctctttctcttagttcttcggcaatatggcatgaagataatctggacctgtggtcctgggattttgatgaaggtgggaaaggtattttaagatcttgactggcagggcatggtggctcatgcctgtaatccaagcactttgggatgctgagctgggcggattgcttgagcccaggagttcgagaccagcctgagcaacatggcaaaaccctatctctacaaaaacaaaaaaatcagccaggcatggtgatgcgcgcctgtagtctcagctacgtgggggctgagatgggaggatcacttgagcaaggaaggctgaggctgcagtgagccatgatggcaccactgcactccagcctaggtgacacagcaagaccctgtctatatacagaaaaaaaaataggatcttgactgtggtggtctccaagtatggccaatacagtacacttttccaagaaagtgattcttgaaaatgccacttaaaggtcagtgttggagcactaattaaatgccatgatgtcccttttgcctgtgatggctgtctgatctgagaacagggcgttgggtgatttggtgttctcacagtaagcctttattgacctctctccctcaccccctacttcttagtggccagtctgagttttgctgtgaattcctttccttgtgtctcttcttgtgaagttttagtaaataaaccctgtaagtaggccgagagcagtggctcacacttgtaatccccgtgctttatgaggctgagatgagaagattgcttgagcccaggagttcgagaccagccttggcaacatagcaagaccttgtctctcttaaaaaaaattttttttaaattagctgggcctggtggcatgcacctattgtcccagttacttgagaggctgaggcaggaggatcacttgagcccaggagtttattggaggctgcagtgagacctgattgtgctattggactacatacagcctgggcaacagagcaagaccctgtctcaaataaaaataaaccctctaagtagattcctgaacaagccacctcatctctgcagtgaatgaggactctctgaggggtggacatttgagccaagacctgtctccagttgtataacttaatgaataaggattgtgcttggcacagatgtgggagttacagaagtggtcaggtgataaatattaacagtttgaagaccaagtgaagaaccagtgttctaattcatttggactttctgaacaccttatgtggtttctctgtccttcccattaaaaacaagtattctgctaccaggcctctttttcctcctgcctgagaagcgtagctgtgatcactgggacctagctgcaatgaaggcagtggtttccaggaggagactacagtttgatctgtgatttcatatttgtatgtacagatgaatactttagtaaggaatcttatgtttgtgtgtgcatgtgtgttttaaactctatcacttttaagctttattttctctgttcttggctttttcttttttcctttttcattttctcctttgatgtctaactctgcattagtagaatgcagagcacatggaaactccagtaactttaccacaccagagctggtaaaatggagatacaacatacaccagtttcagactaacatcattttggtgaagattgatttttttttttttttttggcagagtcttgctttgttgcgcaggctggagtgcaatggcgtgatcttggctttctgcaacttctacttcctgggttcaagcaattctcttgcctcagcctcccgagtagctgggactacaggcgcccaccaccacacctggctatttttttgtatttttagtagagacagggtttcaccatgttggtcaggctggtcttgaactcctgacctcaagtaatctgcctgcctcggcctcccagagtgctgggattacaggcgtgcgcccagcctgtgaagatttttagtatctgctttcctttcttggaaaagcctggctaactagaggcaggaaatgtctatgtctgattaacaagttcctaaatggtctctacctcttctcatttcccactttattgtctttggtctggagacagattccttcatctgtttttggggttctgttgacccagtacagatttgtaacattgtttttctttacagtttgtgatttcaatcctctgctttcccaatgccactttgaattggcttctttaaaactccaacataaaacctcaagtgaccaatatgtggtctcattatggtattttgggttaaaatgaaattaagatagctgggctcacccagccaaacacatttaccaaagggaaattttgaggcatcatagactgtgaagtggttagggaaaaagagagttaaatgttggctagtttagaatgccaagtgtccatcccaacttggttatactggccagagatggcaaagaatagagacaataaggttctgaaaagacagctggtgactggtatggccctgtatactcctgggataaatcatgaagtgagggtctcctgtacatacttgtatagtttgtatagacagtggtgtagatgaggttggtatgtaccagcatacttttggaactttgagaagaactgtagaatttgtagtactctggttttccatccagggaattgctgaccttaaaacctgaggatttggatgcatctataatcttttttgtttgtttgtttgtttgtttgtttgtttttgagacggaatctcgttcggttgcccaggctggagtgtagtggcgcaatctcggctcactgcagtctccgcctcctgggttcaagtgatttttctgcctcagcccagcctcctgagtagctgagactacaggtgtgtcaccatgccgggctaatttttgtatttttagtagagatggggtttcactatgtcagccaggctggtctcgaactcctgacctcatgatccacctgcctctgcctcccaaagtgctgggatgacaggcatgagccaccgcgccgcatatataatcttaataaggttgactattccctgggccgttctttaacttatttaattgtgcctgctatagttcagagtggacttagggggacctagtgaaagactggtattttggggaagtagtccaaggcagccctaggaattaatgaaataaacagtggcattgctgctgcttcttggtgtttttatcaacatacagtacttgattggattgatgtacaagcatgatgacaaacagaatcccagactgcatgtaacttcagttcctacagctcagtgatctgtcacagataccttctttggcgggatatagaactatgtattagagaaatttagcgtcttttttgtataactgaaagaccagcccaagtttgcagttgtagataaaataaaaagaatgggagaagttagagaaagaaaacgaggctttgaagttttgtggctaggggcagtttttatctttatttactttgtttatttgtttgtttgtttttagcacttatctgcaaattagtttaacatggaagagggaggagtattttagaaactagatcagaagatgcatttagaacaaaagttggaatgtgcacacctgggtaaagctctgtaaggttactcttgcccctccatgtattccttaagtgtaccatatcacttaatggtaggtaatgataagtagggcagaaaacatcaaaaggacagcaatattcagttgggcatgtggtccatccataccaaggaccttttcctagtagaagcaccagaggatggtctgtgggaggaagtacctttttctgatttcaatctatatcacctcacatggggacaaattttctaatttttgagcatatattgggatgcagtataccagtgtgtctttgcgtaccatcaggatttcctagactttgatgatattttccatttctcaggaatttttaggataagaactttttaaagttcacttaattgcccagtcctgttgttgaaatgttgtttaatttaaagcataaaatatgctggggagagtggcacacgcctataatctcagctactgcagaggctgaggcaggaagatcacatgagccctggagttccaggccagcctgggcaatgtagggagacccgtcttaaaaaaaaaaacataaaatagttgggccttgccaatgtaagaagtcatatggcagaatcttttttgaaaaacctgtgagtatcaggctgggcgcggtggctcacgcctgtaatcccagtacttggggagactgaggtgggcggatcatgaggtcaggagtttgagaccagccttatcaacatggtgaaaccccatctctactaaaaataacaaaaattagccaggagtggtggtgcatgcccgtaatcccagctactcaggaggctgaggcaggagaatcacttgaacccgggaggcagaggttgcagtgagccaagatcgcgccactgcactccaacctgggtaacagcgagattccgtctcaaaaaaaaaaaaaaaaagaaaaagaaaaaaacctgtgagtatctgccacatgctagttgcttacattaatgcaaaaacacttactgagcttctacagtgaatcagatagtatgttatgaacataggattcataattcctgcctccatggagtactttctagtggggaaaaatatgtaagcagataagcacaaataactgtagttacagttgtaataaatgcattggagaacaacacaactgtttttttaaatttttatttatgcttaccttgtctgatgggtggctttgtagtcttgagatcttaggatgggtgctggtcagttctgagtccctttccctctagggtcaagttttataggaagttatccattgaggcatgctgggctagagttcattgttcctcagcaaggctcttctgttttgtttttgtttttgttttacggggagatggagtcttactctgtcactcagggtgaggtgcagtggtctcagctcactgcagccactgcctcccaggttcaaaccattctcctgcctcagcctcccgagtagctgagattacaggcatgcaccaccacacccaactaatttttgtatttttagtagagacagggttttcccatgttggccaggctggtcttgaactcctgatctcaggtgatctgcctgcctcgccctcccaaagtgctgagattacagggtgagccaactgtgcctggccaggaaggctcttctttttgtggtgctatattgcaggacattggcatcttgctccccgggtaataaatgccagtagcactatagagttgctgtgacaaccaaaaaaggcgctttcatacatttatttccaaacacttctcagtggttggtattgccccggttgaatactactggctgtactgtcaggattcttggaaggagctttgaacaaaatcctctgggagaacagactgaaagtaggtggtgcttgagacttggactggccaacccttttggtgtctgacttgtgtgttcatgttttttaagtaggtattttgaaactgctctcaaccccattttgccatttctcctattgagggtgcagagagagaagtattgtgtgtgtgctttatgaactggcactgtaacaagcatttcacatacttaccatttgaactgttttgtatctttgttaaacagtttttaatccctgtttacagatggttctggtgctaagagataaagtgacttgctcaaagtggtgtgaaactatacttttttttctttctcaaaaagtacagcctaaatttatttgattgtcagttaacctctagttgatgactttggacttctggtcttaagtgtatgggacagacattaattgttctacaaatttccaagctctactgccagaaacttagcacttgtgtaggatgatgatagctgccattctggatgctagaggatacagcagtgaattaaacatacacaggacatatagattgaacaagataaataagtgaatcatatatatagtatgctagtgatacatgcttgggagaaaaagttaatcaggaaccaagtataggagtgtgcagggttaaaatcttagaggagttcaccagggaaggccacactgaagtgatatttgacatgaaagtgagctatactaatatctgggtgaagaaagtattccaggtagaaggatctatgaatacaaaggctctgaggctagaggatgcccagctgatttgaggaacagtttttttgtttgtttttgttgttatttatttttgttgttgttgtttctgagatgaagtttgctctgttgctcaggctggagtgcaaaggtgcaatcttggctcaacgcaacctccgcttcccaggttcaagcagttctcctgcctcagcctcctgagtagctgggattacaggcatgcaccaccacgcccagctaatttttgtatttttagtagagacgcggtttctccatgttggccaggctggtctcgaactcccgacctcaggtgatccacctgcctccgcctcccaaagtgctgggattacaggcgtgagccaccgcacccagccgttgttttgttctttatttactttattcgaccctgaagtgtggtactactatctgttctgttgataaggaaacagagacaaaagttgaaggcactgcaggggcagagctcttaagccactgcctagaactggccatgtacaatagtcctcccttatctgtgcggcgatatcttccaagacccccagtgggtgcctgaaagtaccagaccctatatgtacaaatgcccctcggtatccgtagggggttggttccaggactccctgaggatactgaaatttgtggaatatataaaattgcatggtatttgcatataaaccattaatacgtacattctcctgtatacgttaaatcatctctagattacttataatacctcatacaacgtagatattatgtaagtagttgttatgctatattgtttagggaataatgacaagaaaaaaagtgtacacattcagtacaggcacaaccatcgtaggcctactaactacatttttgatctgaggctggctgaatctgtggatgcagaacccatggatacaaaggtttgactgtactttgtttttcctatacatgcatacctatgataaagtttaatttattaggcatagtaagagattaacaataactaatgataaaatacaacagttatgtgattgtggtctctctctttcaaaatatcttattgtatgtaatgttttcagattgtggttgaccgtgggtaactgaaaccttggaaagcaaaatcaaggataatggggggtactcctgtagatccaaagcatttcagttcagcattaatagggacaggaattgccaggccactagagtttcactttctcttctacattcccctttcctttcctgcttttgggcataggggagcatttgtttgttttgtatacatatctcttatctctgcctacctgaaatttatattctagtcaaggatacagatagcaaacaagataaataagtaaagcattagtatgttacgatacttgcccaggtgaaccagaaaaatctgagactgagtataggaatttggggaagcttgattttggctgaaagtgctgctcatttgggaatctgaggtgcatttctagcttttctttactggccaggcactgccctcttcagaccattgtttggctaaggaaaacgaatgtacatctgaattctagagacactctgtgctggagatggatttgcactataacaggcatttcacatacttatcgtttgaactgtctcatatttttgttaaacagtttttaatccctgtttaaagatgattctggtgccaagggatgaagtgacttgcttaaagtggtgtgaaactctatactttttttttttttctttttaaaaaggtacaactgaggccgggcacagtggctcacgcctgtaatcccagcactttgggaggctgaggcgggcagatcacctgaggtcaggagttggagaccagcctgaccaatgtgatgaaaacccgtctctactaaaaatacaaaaattagccgggcatggtgacatgcgcctgtaatcccagctactcgggaggctgagacaggagaattgcttgaacccgggaggcagaagttgcaatgagccgagatcgcgccattacactctagcctgggcaacaaaagtgaaagtccgtctcaaaaaaaaaaaaaaaaaaaggtacaactgggctgggcgtggtggctcacacctgtaatcccagcactttgggaggctgaggcaggtggatcacgaggtcaggtgtttgagaccagcctgaccaacatggtgaaaccccgttgctactaaaaatacaaaaattagccgggcatggtggcatgcacctgtaatctcagctactcaggaggttgaggtaggagaattgcttgaacccgagaggcataagttggagtcagccgaggtcacgcactgcactccagcctggtgacagagcgaggctctgtctcgaaaaaaaaaaaaaaggtacaaccttccagattggccaacatgatgaaatcctgtctttaccaaaaataaaaaaattagcaggccctggtggcacaggtctgtaatcccaactgctagggtgactgtggcaggagaatcacatgaaaccgggaggtggaggttgcagtgagctgagatggcgtcattgcactccagcatgggcgacagagcaaacaagactccatctcaaaaaaaaaaaaaaggtacaaccttaatttatttgattgtcagttaacctttgggcatgtagcccaaatgctcccagactggatacgagactctcttaagattaaaaatacagattcctggctgggcgcagtggctcatgcctataatcccagcactttgggaggctgaagctggcagatcacttgagcttaggagttgaagaacagcctgggaacatggtgaaaccccatctctacaaaaactggctatgatggcatgtgcttatagtcccagctactcaggaggctgaggtgggaggatcacctgagcccaggataggaggttgaggctgcagtgggccatgattgcaccactgcactccagccggggtgacagattgagacaccctgtctcaaaagaaaaaaaaaaaaagattcctggcccggcccccatcccagacctgctaattaagaatctggagggtagaattggattgagtagctgaggaggttgaggttcaacctggttgattgtcttgaccactccctcaggaagttggtctgagaactgggattggaccccagatgtacttactgcctctcagtttactgctctttgcacctggttgtactgctgccttttgagataaaaagttgtaaagaaggggacgtttaattttatgagatgacattttggttcttgtttcatagttttcttggggtcttactattgttttggtcaccctggtttgtttttgtttttgtttttgttttgagaccgagtctcactctgtcacccaggctggagtgcagtggtgcgatctcggctcactgtgacctccacctcccaggttcaagtgattctcctgcctcagcctcccaagtagctgggactacaggcgcgtgccatcacacccggctaatatttgtattttcagtagagaccaggtttcaccatattggccaggctggtctcgaactcatgatccgccctcctcggcctcccaaagtgctgggattacaggcgtgagccaccgcgcctggcaacccttggttttaagcagtacctgaaaggattttttccagagaagttacttggtttccttagtggcttttgtaatttgtttgaaatagggagaaattggttaagtttagtcttaggaaaaagtgatcttcatcattttaggaagagcattttctctggaaatgatgatagccacctgttatggaaaatgtggctaatgaaagtgccctggatgaagagagaaggacttatcatttgttgggattcattagtttgatgctgtagctgctttatttgaagggccctttctggtgccaaagaagtgaagaagcatcagtcacttggttgtggtttttctggcatgcctctttttggtagacagctgtgaggtggttattatggttgtttctcataatctgattgagttttgctacatgattcaatgactcttccccttttggtctccttcttctaaccttagtgagttttctcttatcttctggtctggaaggatagagatatggtagtctatatatctctaagcccagaagagaatgaggcctttgtcttgttttacatcactttctagatgttcttggtttgacatctggttgcaagcgccttcctggaggtttgatcaggctagtgcttcaggggatatcattggaatgggctaagtctgcaaaggggaatgtgtctgatcttctagaatggtttctgtaagcagaatggggtagatagaacttttcactgatttttgtggtggttttttttgtttgttttcaagatagagccttgctctgtcacccaggctggagtgcagtggtgtgatctctgctcactacaacctctgcctcccaggttcaagcgattctcctgcctcagcctcccgagtagctgggattacaggcacgtgccaccatgccaggctaattttggtatttttagtagagacggggtttcaccatgttggccagcctggtctcaagctcctgacctcaggcgatctgccgccttggccacccaacgtgttgggattacatgcgtgagtcactgcgtctggccaatttttattccacttggaaatttatggaagtttgaaagaatttttaaaaaacaaaacttttttggggagtggtagttgcaaactagttgttgattcctctctcaccaaaggcagatggtcagtttgtttagaacttgaatgaactagaatgaaggaattgtgaagtagaaaactgagttatggttcctaggttatgaatgaagagaatcataggctgagtgggtttgattccctgtgacaggtgttggtataatctaatgagatttttttattttcctgtcatcagcttggcttcaggaaatctttagtgttgtctctgttgaggccaaataggaggttagaaatctcttattgtcctaggtcatataaaaagtcatgtttccccactatttaaaacaagatgaaggtagtctccttattttaggaggcggggtctaggagtaaaactaagacaaacatgtttctggacaatttctcctcaattgggggctaggggttcttgactagtcttcaaagaaggtctgaaatactaggggatatagaaaagacaggataaggggcgttagatacagttgtctggctggggagagaagggacaatgagaatgatttatgctggtcattttatgtaccagggtacatagggtgatttttttggtggaagcctagtctgtcctaagatattactcctgagatctaagtgagccacgtgcagctggcaggaagctgaaagctgttggttgggagaggccttaatttttacacttgcccctgcctggaatgccctatcacaggggagggtcccatactggaactggatcaacagctgtcgcctgtccctggaatcacaggaagcggaggacggggtgcctttgtatagggagctctgaagccagacaatagtttgtgctggcggggccatgtggcgagtcatgtgacctggggctgttttctgctggggtccttacccatctgttctctcggctctttctgggttatcaggcgccagtccaagtcctcccaggcagccagcttcatggccagagattacgagcactaaccttcctggcaggggcggtgtggcttcgagtttatgcagattagccatgtgtttctcacttcaaggcgttccacaggaaaagccttttcctgtgtttggctctcagtgggcggttcccagcttactgtactgggactcagcaagcagcaggcatgcaccagagggatcacagtacactggcccccctctccattccacctccaatgctacgtcaccacaacacaaccactcgcgctctcatactgttggtgtcattcattcggtgccaagattgctttaaaaaattcccttggccccagttcaaacaggagtacagctgggatgtgttagattttaggcagtctgccctcaatttgagatgagttataaatagcagtgccgacttccttaactaccgctctctgaggtaaaatgcaggttaattactgtgggaatcaattaggggggttcttttggttaaagagccagggatgcatttttttaattattattattaaaagtcatataacaaatctagccaggaataaattgaaagcacaaggagtaataatacttaaatgtccaaaagccaaggttatagctctaggtttacactagccccaactagttagcatttaggatgataaaatgagtagtggtcaagacttctcctctctgatggacacctttttggcagctcctggcccaaccctctctgttcttattcttgctggcccttggcactgttgagtactaaatttagctccttagggttgccgcctggtcacttctttctatttccttggattggaactggagctttcctcagttggacttttatttaaataaaattatgaagtttctctttcctggtgccactgccacgggtggtacatttttgtgaatggtatatctctgcttagaagttttgagttcttggctctgtcttctctgctctctcctcggtcatggtcagatggagaatttgcagctattttaatctgtgagtttcacaaagtggttactttgggttataagacattcagcccaggtctaccttaaaagtctagtctgttatttcagccgtttttgggggtcattttggttttccttgatgcaataagaagttgtaagaggttccagtagccagctagtctggagggtcttgtaattctattggcttggagcaggggaactccctatgcaaggggtctgtctgctagctgtttgttctgaatatattcggaaggacaagctgctaggcatccttgcctttgatgcccctaaactgcatcttttgatacatttcatttggcaggcagtttataacatggccagtgatctggaaggaggtggtaagtggtagatggagatgaggagttttcttatggctctttcccccttttttatttttattttttatgaatgcaggagagtatatagcagggggcccgactttgctgatcaaggggcagcattttcctctcaattatgtgtctctgtggcagagcctttgcttttgaagtgtaatcacagtaatctactcctgtggtttcccattgaaaggatttcctctgtctttcccagagtggaatctctggctttttgcagctagggtttggagtttccatcccctgccttgtgcctgcagactgctgatactggcttttgtatcttgcatgtagggatttttctggtctgaaattgctactttccaataaaactgattagtgaatatttaaggccccttctctgttacgagagattgggagatggcatttcatctgtaactgcaaatcacaaatatttcacgatggtt

SEQ ID NO: 835 - DNA, 25739 bp, Homo sapiens
  source 1..25739: mol_type = other DNA
atggaaggcatcttttctctaaagagtgtgagctccctgccaagcagcacaggcgcttaataggctttcagagcagcaattctagaacctcccttgtggctttctgatctcccacagcccttgtgtttgatggtcaggaaaggagaatacccttggatcgtcttatctccagaccaccccgaggctggctggacttaaggggtgaggaaagacaagatgggtgagcagctgctttcggctgaaaaccagaaagaaatcccagtgtttttgctttattttggtttaaaaatcaagtcgtatgacaatggaaacattttcctggttgtcctctcctctctgcccatgttgacagaagacggacttgctaattctggctggggtttttccctgcctgggctgtttttctcttttatcttcatcaattgaagagggctgctgtgtctttcaaactgtcggaaggtatctgtatttttttttctttcacataattctgtaggtcttttcccagatatgtatttttctctctaacttctaactcgctgaagtttccgcccatgtgacttccagcgtgagttaccagaaaccacaagagagagagagagcgtgcaagccccaaagcgagcgacatgtccctttggggagcagtccctctgcaccccagagtgaggaggacgcaggggtcagaggtggctacagggcaggcagaggaggcacctgtagggggtggtgggctggtggcccaggagaagtcaggaagggagcccagctggtgacaagagagcccagaggtgcctggggctgagtgtgagagcccggaagatttcagccatgcctcacagctccgacagcagtgactccagcttcagccgctctcctccccctggcaaacaggtagagtcctcctttttctctctcctaccttctgattctcctgggggatggaaagagagccaggcttccttgtcctgcccagggagctgaggatggaggaagtggctcgttgcacgggcactctgttagacttaggacatggaatttgctactaagctgtgcatattggcagagatcctcatccttccacccattctgccaaagcccctttttctctccattttccaaggctgcctatcacctctgcctcactggggttgccaccctaaaaagctttctaggaagcaaagaggaggatgaacatcaaagaatgcagagaaaagagtctactgttctccaaggctgtagaaaagtgagaggagttttcaagtgggccgctggcatgcacagctcaaatcctagatatgcagtttcccaggagacagccaatagggaaggggagaaaaggggttagggaaaagttaaaaaaaaaaaaaaagaagaagaagaagaggaagaaggaggaggaggaggagaaacccaggctagcatagaaggatctctctactggggcactgcctctgttgctagcacagccagcaaggggagatgctagaggtccagccaatatctctttgcttgtggcttctggataggagcaaggaaatgaatgaggaggtggctctggaaatttgttggaagacatttgctggtagttcatcttagctctggggaaaccagagagactgagatagggattgtgggagcatttggagtctagattgtgacttccaagtccaaaggttttagcttgaggattaccaaaaaaggagtgccctgcccatctcacagcttctagggttttgttctgcaccacactcttgacatcccttgctgtaggaagccctcctctttctcatccgacatgtatccgtgggttaaaattttctcaaccttcatagtttaaaaacttcattctttccttagcacagatatccacaagggttttcaaaatgctgcagccaaaataaaagtatataaatattgaacagggcgtatatcctaagcctctaataacggagcagcaggctgggatgagtctgggtggagacctctagaaggcacagaatccagtctgctgctcaagatggtgtcagagtggctctgactgcctggaagtttgtacttttcttaggaaggaaattactcatggcttccatggtaacctggtgccccatcccccttagaggaagagcacttccttcctatctatgccaatgacctcctaccacaaaggcctgaaagtattggacatgttggtgagcccagtacttagtgatcccagagctttgcccttggatctgtgcccctctagcctgtgggagacgtggaagggaacagggcatgagttgccaggactcctacacctacactgcagcatctgggagagaactggagctaacctctctgcccaggcacaggacatgcctctctctgggtgtaattagagaacacccaaagatccccttatcctaccaagcacccatctactgcccaccacagccaggtcacctccaccattaacgttctttttggcattgatgtgccaggcattgtgctggggccatggggaatgtcacagtggctgagcacaacggaaggaaagaggaggcagatctgggatgcaccctcagctcaggaatgcagcagaagaccacatggggtgcagagtagctagcggggaagggtcttggaaagccattgggctcagcaccagaagatgtagcactctcagatgaccaggagtccttgggcacactcttagagcctcagtttcctcacatataaaatggaaatgatgatatcaacttcacagcattggggaattaaacaagagcacttctgaaagaacacttgcccagaggttggcatatagtaggcactcaacaaagtctgaaaaaaagaaaacagctaaaagaacagcaagaagagcctaaaggccaaaaagtgagagggcgagggtggagcagccctacagaggagaggtgataaaacacacttcatcgccttaaccattttttttttttttggccaaatacagctctattgagtcctcaagttctcttttctttttcctgtagctattggtcaaaaaagtcagagacctgggaatgtgtaagcaggcatggagaagagctctccttcgggtgcaggcttttggtaaatagagggatggagggttcatgcagagacgaaggcatggaaggatggctggacggataccacacaccaccagagcctgctttcactcagaagggagatgcagacccatgtaatcctccccgtctctgcttcccaggactcatctgatgatgtgagaagagttcagaggagggagaaaaatcgtattgccgcccagaagagccgacagaggcagacacagaaggccgacaccctgcacctggtaagtgttcagatcaatcttcatcctcgtgagctttaggctttgccctccgccatctgggaacccttggaccatagctttgattctgcttgtgtggggatgtgtatgtggggtgggttagtggagggtgagggccgtggggtgaggtagggaagggaagctgtcgtgagagtgctttaagaaggctctgtagtccgggcgtggtggctcacacctgtaatcccagcattttgggaggccaaggcgggtgggtcacctgaggtcaggagttcgagaccagcctggccaacatggtgaaacctcgtctctactaaaaatacaaaaaattagccaggcatggtggtgcatgcctgtagtcccagctacttgggaggctgaggcaggagaatcacttgaacaggcagaggttgcagtgagccgagatcgcgccattgcattcaaacctgggtgataggagtgaaacttcatctcaaaaaaaaaaaaaaaaaaatagaaggctctgtagcagggaatgggccaggaggctgaacagagaaatgggcctttctaccccaggagggctcaaggggtgggagaaggcagagctgtattgggaaagaatttagaaggtatcaagtgctttggggacggcccattgtctcgcagtgcaaggaccacacatagtcgcatcccttggcagagacccaaatgcccctgcatttgacacaaggaaattcacagggcgctgtaccagattcctcttttcagagcattattaaagtcttattttgaaatttctgtctttaatggtatcccaaggggtctatgaaagatgcaatttcaagtgcccttatctgggatgatcaccatcctagttgagttgcctctagtcccaaatttttctagagaaagcttttacctctgtcttgagtggtccaggggccttgagcagtgctgaactgcagttccgccagtggccaaggccctagatggtgtttctaggttctggctgtgccccttataaagtactgcttcctccccattgctcataccttaccaccttacctctcttcactctgcccccagtatggttcttgttcaaccaactcttcactagttcctttctctccatcccctcatccccttccctagcaactctaccttcctgcccttgctccagaaacattcccttacctctaatagcctagcaattcctttccatggaaaaagtgcaattggcaccaaaaatcaataagcttgtatttatctggaagattagcatgataatcagccagttagaatggctgtgttaaccgtatcaagaataagtaagtaagatgtagttttaggggaaataatgcatctttcagctttacaaggaaacagagcagactgcaccaacagctctgattgggtgcttgggttttatttgaaatgtattcagcttacactccattgcacactaacattaaattcacagctatttgttaactttttggaaagaatgaatgaacagaaagtctgtactaactgtgctcaacagtctgaatgtcaagtttttggtggccctgctgcttgtatgttctccatgatttcactgtgtccccacattctggtttaccaccttaagcttgaacatctatgatccttacctctttctctatcagagtctgattctgattcactattctttagggcaagcaaacagaccaatcaaaatttaaaaggataaaatcttccttgtgtacaagtagacaatgtcctcagactggcaaactgctgtaagctttttaagtgtgtacctgttttcttaagtggaatgtaagtatagttcggcagctcagcagtcagaacagggattgaatcccagccctgctgcctactatctgtgtgacagagacgttcttggcctcccttgggcttggtttccttatctagaaaatggaaaatgacaataactaccctatacagatcgtacatttaaagagcccaacacaatgcctgtcattcataaatactcaaaaatttaagtataataagagtaataataattatcataagaagcaagataatcacaaattatacacacattttatatatatatgaaaacatatatacattttgtgtatatttaatcacagaagctcagggttgaaaggtttcttaaaggctagaaagtttagacataagtttgatgcttcagacttctctgcaacacctccagccaatggtcccattgtatgcctggtcacttctagggctggagatcttcctctctcccaatttatgaacagaagagtctttcctatgttaagctgcacccctgtctccctgtaaattcaactcactggtcttcatccaaacccttggggaacgtattaatgagggtgacacagatgtctctttgctgcggcaaggctttcagcactgaatcagctctctccctctccaagacaaatgtcagagcccaaagagtcagctcatctaattatacaagtcatgtgacattagggtaatctctagagcttgagggtccacagagccccaagtcatatagtcaacatatccatagccacaccccagcctcagtttctagaatgttccaatcttccccacatctgaacacagattcctcctccactgctttcttttgagcaccacagcatcgtctttaccttttgcccaatgagtaggtcgcagcggagttgatgcagcaagcctgcggactgctgccaatgcaacttatgtttcttggcttcaggtagaagcttttggcagcaacgtgttcaatctgccctacatcaaattagctgtggtttgacatcttcctttcctccgagatgacaatcacctatcttctccatccattatcctcttaattatgtctgagattcaggtgaaaagtcttctggtttaccaccagtgtcagggctcagtgtgtggtttgcccttgactcctttccatgcttggctccacatgctggggttgttctctggccctcagacatggccataggcctcgcctaccagtgctttacagatgagggtttgggagctactgagagtaccatatcaaaaaaggaccacattcctattagggttctagcctcatatatactggtatgttttcttagtttcaactgctgtcactattatcaaccttaaaatactgaaacaattatcttgttcctctagtgagagtgtgggatgcttactattcgacattttcagcatctatcctataaatggctggcaccaagacactgtacatcgattgctttaaaaattgacagagtagggagagagcctctttttatgattgtgttataaatccctggccttgactatctctgacataaaatggatcggtgattcctttcgtaattgtgacatcaacaaacaatctaattctgttttaattctccttttgttgagcatctcacacaagcaccctgcacacttagttccttttctcctgcagacaactgtagggttcattgtatatagtacagatgttgattaaaaaagagaaaggcataacttgaccagttagtttctaaaagatatcaatagctaataagtggacctaagataatcagctgaaaaattatttgaaataataagagaatgcagtcagcttctaaaattaaaacaaaatgtaataacgttcctatatgcaaaacataaccaattaggaaattaatggaaggaaagatcctgtttataataccaatgacaacagcaaatggaaggaaggaataatttaacaaaaattatgaagagtgtatcctaaatgatttttaaaagattcaaataattggaaagatataccttatgtaaagttagcaattttccttaagttaattgataaatttaatgagatcccaataaaaaacccaatagggttttctgggatttgggcaagaactagattagctattctaagtttccagtgaaaaaaaatcatatgacaattgccaggaaaattctaaagaagaagtataatgaaaaaagattaactgaccaacatattaaagtgaaacacaaatacagaaatcaaaacaatgtggaaaagacagaacattgaacaggatagaatatggaaacagacccaaaaacaaattcagattttaagacccaaatacatatttcaactcctaggacacaagtataaatacaaaatgggctgggcacggtggctcacgcttgtaatcctagcactttgggaggccaaggtgggcagatcacttgaagtcaggagttcgagaccagcctggccaacatggtaaatgttaaattttttaaaaaaaggaagctaaagaaacttgaaaagacaaataaccattaaaaatttatcttggaatgaggaattattttctaaataaaacataaaaccctgaagccataaaggaaaagattgatatacattacttttattcataaaaagtaaaagtttctttatagatcaaaatactgtatgcaaaatcaaaggcaaatgacaagctgaggaaaaatatctgtaatacatatgaccaaaaaaggtatgtttacttactatatgagagagctcttatgaataggagatgattaacaacccaaaagaaaaatgaacaatgggccgggcgcggcggctcacgccttaatcccagcaatttgggaggccgaggcgggcggatcacgaggtcagcagatcgagaccatcctggctaacacagtgaaaccccgtctctactaaaaatacaaaaaattagccaggcgtggtggcgggtgcctgtagtcccagctacttgagaggctgaggcaggagaatggcgtgaacccgggaggcggagcttgcagtgaaccaagatagcgccactgcactccagcctgggagacagagcgagactccgtcaaaaaaaaaaaaaaaaaagtaaagaaaaatgaacaatgactatgaataggcaatttacagaaaagagaaataagtggcaaataaatgtgtgaaaagatggtagaccttatttagttaggaaaatgccaattaaagcagcagtgaggctggcaaagatgaaacatgttgttgatacacgatgttgccaaggtaatggagaagcaggcaccatcacacacagctagtagtagagtctgcataaccctggtagaaggcaatttgcccacgtccattcaaattataggtgcacataccctgcgactcagcaatttgacatccaggagtgtgttcacaaacaaatccacacatcatacaattctgtacatgtaaagataatcattgctgcattgtttcttataggaaagactgaacataagctaaaaaaatccaccaataagggattcaataaattattgtccattctgtggaatattgcagatatgttaaaataatgagttacatctgaatgtgctaatctggaaggattatcacttctgtactttaagttaaaaaggcataaatatagtccatagtttgctaccattagttttttaatttaatgttttatttatttatttattttttatttttagagacagggtctcactatgttgcccaggctggtctcgaactcctgagctcaagtgatctgccctgcccaccttggcctcccaaagtgctgggattacaggtgtgagcaacagcacccagccccttctgtgtttttaataaaaagaaaaagttacatatatgcataagtataaatgcaaactttttcaaatagattataaaaaattgttaatgatatttatttctgaaaagtaggactaaagatctaaagcaagagggagatacttggcattctttaccttttatacagtttgggattttttatcacatgcttttatctttataatatagatatcaaaattctcagcattgatcattaccacacatgcattaggaggatttcttttctaattttgacatcaaacattgaataatcttccatcacgacatggaagagtattcaatcttgacgttatcttttgaacatcatacataaatatctcagcccttgggagaaccaactgtaagttgggatttgagtgactctaaggtccacagtactatatgataaaagatggcaaatccgtttcctttgtgtagccatcttggttggttggtcatggctatctggtgccgtacagctggaaggatttcaagtcaaagaccaggatcagtggaaaagagagctgaggtcaattaagaagctttattcatgaaaaggctaaaatcagtggagttgccgggagcagtggcaaatagcagtgttagccctgagccgagctgttgacaagtcatatctggcctggtggatggagctgaaagcaagtgagagtaacagccaagtttgaaagcttgagatttaggtactgtcttagatggaagtgggccaggtgcttgcctggggctgcctcctgaaggagtctcacaccagtataagaaaaaagagaggtttacaggctccagggatgtgctttgtcatatatgacagaaaagtcatgagtataaattatgcattaaatgaagctttgagctaacactgtgagaaatacggtatttacaattggagaaaaattgagtaatggaggaaaagatgtttgggtagcactattgttcttggccttctgaggaggcagagaaggatgcttacggtcctatttcactcctggaattcttttgctctctctgggagaccatgccataatgtttgttggcacagataagtcacaggtcaggaatgttcaggctagttccacccttaaaaagttcaatgtagaatcagtgaaccatctatggaaagagatgcgacccttctgtctccattgctatgaatttcttttaagaaaaaaccatgttaattgaacaaacgactatgtattaaccactgtgcctcaagtgctctccctgcagcatctcatttaatctgcataaaagctgtattttataattccttgcattaagtaacttgatggagatgacacagcttgtgactaggtctgtctgacgtcagaacccattttcctaaccattaagttttactgcctctttcttcaaactctgatgaagatgtattcatcttccctaacctatattttccttgaatctctacatgaattaatttttttgtcttttaagcaatatcctccaaaatctacactgtcccccagccatcatcaggcgtgatcaagaaagtaaagacatgtttactttcaatacagtatatccattgtacaattgatatcatatatgtcatatatatcatgatatcaacatatatagataggtactatatatagatagatacaattggtatatcaaatgatacaatatgtcaattgaaatcttttttgagaagtctgtgtagcaataaatgttaacatctttcacaggaattacctttgacacaacagagtttgaagaaaaaataatttacaaagatgcttagttcatcattatctgtgaatagtaaatactttaacaatgctataaaacttgacagggggcttacaacagaagatgaagcatattatgatacattcatacaataaaaaaatttatgctggtactaaaaatgattatgtagatctgtatttatcagcatagaaagatgtcagtgatacagcattaagtgaaaaaggcaaattacaaagagcatgcagagtataaccctttcacgtaaaatttgtgggttttgggcatggtcgcatgcataaagagatatccggaaggatattctccaaaatgctaatagcagttatgagtggttgagtttgggtagttcatcttattcttggtacttttctctcttttttattataatgaatgtgtgccattttaaaaatcagaattttaaaaattaggctattttcatttggggagggaaaacacatcaaggaaatccaccacccctaactgcttgtcttaccgatgacgggtcggcatggctaagtttgggaggcatattggaaattgggagtccagctccatgctggtgttgatgctgtaaagaacgactgtttgggaggccaaggtgggcagatcatgaggtcaggagactgagaccatcctggccaacacagtgaaaccctgtctctactaaaaatgcaaaaaattagccaggcgtggtggcgggcgcctgtagtcccagctactcgggaggatgaggcaggagaacggcatgaacctgggaggcggagcttgcagtgagctgagatcacaccactgcactccagccaaggcaacagagtgagactccgtctcaaaaaaaaaaaaaaaaaaagaatgactgtctgtctacataggatgatggtcctaggtcacaaactgacagctgcctgttcagcagatgtcttgatggagctattctcagcagcacccagacttccttctcttgagcagaatgggagtctccccagagtgcccttgtgcaagcttctcagaggttttcttactcccctcttttgaacttagtctagtcccctgcttcctaggaggggtgggttgggtccacagtataaaggccccttcagattgtgggatatctgtagagggttccactacgggttcacatgatggcttgtggagggaataacaatcataatagtcatactaccttgttgataaaatttcagaattaagtgggaactcagagatcttctagggtgacttgccacatttccaatgaggaaactgaggacgcccaagaacccaaacctcttgccttcccaccagtctgcttttgtttcatgccactttgctgaacagagctttactaggcaggtgtttacataaggcctattgcaaaggtgggccaagaagcaggccattaaccagaacacttgaactgcctagacactcatcagctccagaacatacggctatacatgagaccagaaagagagtgagtccaaacttgacaggggctgaagtgtaaatgtttctttgtttaaagagattttaaagttgtaatccaaaattagaaagggcagtgacatattggggaaaatatttgcatcaaattaaagaaatgaaggtttaatatttatgctacagaaagaaactcttataaagcaaaacatcaggactccaatagacaagtgggcagaggcaatgaacagaaagcttacataatatttttcctaccaaaatgaaaataccctaatttcctattctgattatgaaaacgatacacactaaggcagggtttctcaaccccagtggaactgatacttcgagtccgataattctttgttgttggggattgtcctgtgccttgtaaaatgtaaaatttacccacaagatgccagtagaacaccccctcaccctgcttagtttgataaccaaaaatatttccagaacttgctaaatgtccctggaaaggcaaaatcagtcctagttgagaacgctacactaaggagaaagacacatggaaagttgttctttctccttaatacttgacaacctgtaacattaacatgaaattaagaagccttcatcaagctaattggcaacaagtaaattatttaaaattataacacctaaatgccagtgaggttgtagtgaaatggatagaagcattcgctagtggtgacattatatacttgatatgaccccttttcagtaatacttctcaggactgggaagattgaatgcctcctttgcctcattcatttcattcctaggaatttctccaaggaaatcactgaacagagacaaaacccagtgtgcatcacgatgttcatctcagcattatttttaatagtgacaatttgatagcaaccaagatgtccagcattagaagaccactttaagtaaattgtggataatcaatttgatgatgcagtcattaaaaattatgttgactatgtagatgtgacaaagttatgacagaaagcaaaatacaaattgtatgtgtactatgattgaaattttgtaaaaataagtatgcatgtttgttcaaaaggatgagatggccaagtgggatggttcatgcctgtaatcccaatacatacggaggccaaggcaggaggatgacttgagaccaagctgggcaacagagtgagatcctgtctctacaaaatataaaaataaaaataaaaataattagccaggcgtggtagcttgcacccagctactttagaggctgaggtgggaagatcacttgagcccaggaggttgaggctgcagtgagccctgattacatcactgcactctggactgggtaatagagtgagaccctgtgtcaacaaaaaggatgagatctcaatatgtgtaaatgaaaacagctgtattaagggactaggatcatgggcgtttttaacttttaaaaaatatctttaatgtagttatactgtatttttttatttttaaagaaacagaagaaaatggccaaatagagagctgaaggaactctggaggacatcaagtacaaagagacaatattactgagctcgaatttggggatcaggttttggtaggagaccttataatttataccccaaataggaatacttcgagagtggaagatggaacttgtaaatattacaccaggaaaacaggtgtcccagtaaatgtctggtcaccctagacagggaaaccaagaaagatgacatgaagctcttatgaaaactcagaagtgataaagttcagagtcaagtagaggggactggattcctatgaccaaaatgtgatttcctgcaactgaggaccctgtaactaaaaaagggtactcagctggcataagaatatgtcttatcattaagagagtaggatgacacagaaaattataaagcaaaggccatattatcagtactagagctgagatcagcggaagtgattcatctactcaacaaatatttatcagccaggaacagttcgttctaggcactgagaatattgcagggacaggacagacagagtctctgatttcacgaaccttacagtcagttggaagtcaggctggaaaacaaataaacacactaatcacatgacatgtaaagtgcttcaaagaagatgaaatcatgcaatgtggaaagtgtctaagggacgggattggggcagcgatcaggggaggccttcctgaggccctggaatttgagatcaaaggtgaatcaaagaggagactggaaagatctggggagagggtgatctcagcctagagagccttgaggccaagctgcgaggccaggcaaaggtcagaaaggtgcttggtaaggtggagaccaagttcaagaccataagggagtgaggaggaactcagtaataatggcaattgtagggctgagcacagtggctcacacctgtaatcccagcactttgggaggccgagttggttggatcatttgaggccaggagttcgagaccagcctgagcaacacagtgaaaccccatctctacaaaaaaaaattttttttaaatatccaggcatgcacctatggtcccacctacttgggaggctgaggcgggagatttgcttaagtccaagaggtcgaggttgcagtgagttgtgatagcaccactgcactccagcctgggcaacagggcaagatcctgtctttaaaataaaataaaataaaataaaataaaataaaataaaggcaattgtgctgctaggagcaggaactggatggggcatgtggtggggacccaactaattcaaaccctgcctgggggatttctctgaacctaaactctgatcataagttgagaagcaatagcacctcactaggctgtttgaccgtttaattgagagggcaaatgtaagaacaaagcaatattgtcattttttttttacactgttcctttgtttaatgcagacagcctgcccttttcctagaaatcaatcagatatattatcctacatgaacacacacgttcttctttctggttgcttataaactctttaaggatatcagtagtttcaggggcttggcctttcacaactaggcaagtctcctttgttgggtatgaatggagagagggtcaaatttgaactagggaaatggcacgacgaagttcttaaagtggttgtaattctgccactcccacgctgttggttcagtttggggaataaacagaggtttgacctaggccttttgaaaaaatgaatctcttggattcatttggaagtatcccagatttacaaagtagaagctattaaagtgtttgagtggtggttaatcactctctaggaattctcatggacatcacagatttactcagctgacccttcttcataggcacatctcagattttggaaaattattccagattataagttggcagtcaagcaacgtgatttgatcgaacacttactctatggcaggcactgtccttgtcactgagaacaaaacagtgaagacaataatagctcctgccctcacagagctcaacaatgtaaatggtaaggaaacgaaacggttaaagttataattaatgaaacacgaatagatccctgagctcttgcctttccattatatgaatgaactgtgctggactatttagaattgtttccaccaatttaagaatataatagtagtgtgcttaaatggacattttgttttagaaatttttttaactagaaatagtctcccaactctttaaattttttaatattatactataaatgataaaataaaatacatatttaataaaatgaaaatatgtaaaaatataaactctttaaggatatcagtagtttcaggggcttggcctttcacaactgggcaagtctcacaaatttaatttgtttgttaacaaacaaatttaataaaatcaaacactatatagttatgttatatttttattattttgagataaggtttcactcttttcccaggctggagtgcagtggtgcgatcatggctgactgcagcctccacctcccaggcacaaatgatcctcccaccttggcctcccaaatagctgggactacaggtgtgtgccactatgcctggttaacttttaaattttttgtaaagattgggtatcactatgttgcccaggctggtctcaaacttccgggctcaaatgaccctcctgccaaagaagcctcccaaagtgctaggattacagcaactgcacctggccttatgttattattaaaaggaatccactatgaacatgattttttgcccatttggctcacttaggaagcatttttaaagtcttgatgcctgcaaccactccagaacaattaaattggaacctctgggggtctggcatccaggaatccagactgtttaaggctctccgggtgctggcagtgtgcacagccagggttgagaatcagaagcagtacatttgcagcctatcaggtctgtacctgaatatgtggagtgagtagaatgtgtggagtgagcagaatgtgtggagtgagtgtggggcaattgtgtgggtaagtacacagatactctgtcacatacagtggcctgatggcttaaaacaaaacaaacggccaggtgcggtggctcacgcctgtaatcccaacactttgggagcccgaggcgggtggatcacgaggtcaggagatcgagaccatcctggctaacacggtgaaaccatgtctctactaaaaatacaaaaaattagccgggcatggtggcgggtgcccgtagtcccagctactagggaggctgaggcaggagaatggcatgaacccgggaggcggagcttgcaatgagccgagatcgtgccactgcactccagcctgggcgacagagcgagacacggtctcaaaaaacaaacaaacaaacaaacaaactattcaaacccttgctttgatggcagttattatttgttttgttgtttggttttgaacattgataatcttgctagtggtaacctttgtaactcgaagcatcagtatcagccaagattgcatgcattcagagacaagtgagagaccagccatcaaatgaggaatcaacaaatcatggcctacttttctcatgtaacaagaagttcaaaagtggagagaccaggctacagcaaggaagaaccaagctccttctctctaagcagccatcctcagtatgaggctttcattctctaggctgtgagatgggtgccgagcctctcggcatcagtctatgttgaaggaaggaagcctttgtccttatgagcaggctgtgcctttttggtaggaagggaagctctgccttcacctccctcccgcccatcaggtacttctgcttacgtatctttggtcagaattctgtcacatggctacccctagctacaaggtaaggtaagctggaatttttttttttttttttttttttttttagcaattcttttcccagtctttctagaggaaggcaaggcagaaggggtttgggatggacgctgaatgaaccaaactatagtttttttcacatttgagggcaatgaaatcatagtcttgaaaaccaaggaccaggcgatagccttttcaccctgtgactagacaggtccctgagggcacggctgatgtggccaatcttctgtaaatgcaaaggtgcttatggccctagagcttcagctctaagacatgaaagtgaaggttcctccagaatcacacacgtgcattattcagcgcaaagatctgtggtttggtgattcttcttctcctttcataaggtgagaggcagcagttggggtgaatttccccaggaatggtgggagatgtgggcctagatcctcccgctgcttgggaagagtcgtacttttcagttggaagcctgctccaggaatggcgggctccaccctctgcatgtgacgtacaggggctggtaactgatggagcctgaacatatatctgggtgtgagggataagcttcgaacgccacttaagtgtaggtgggagccaaaaggtcaccctgccaatacatgattacatgtcctgttgaggagaaaatacacagggactattttcacccttctggaaattgtgattagaaaatgcaaggagaaggccaagacactaaactggagctggtagggaggaagcctcagccctgctcagggtgcctggacagtccccaccagggcccagctaggaaatgccagccttgtccttggtcttcgtccctaatggctcccggcgggtgagggaactgcctggggattccccatcgttgaagcgctctgtgagtgaccccctcctaagcccctccagtaggggatttcccagaatgttcccacgcccccaggaagcctcttccttagccacccccaagctgcttgcggttcatggtagaggtaggtggcatcaaatgaccccacaggtgagggatttgcctgaggtgggaaaagagggaagataaaattggaaagccaccggggctgaggaattatctcataggagagaactgtcaaacagtataacgtttaaacagactttaaaggcaagaaaggatggagggcacagactctgaagccagagtgcctcaattcaagtaccggtgctgcaacttccaagctgcgtgatcttgagccagtgacttaacttctctgttcctctgtttttcctcttctgtaaaacggagataatattttctaccacacaagtttgttgaaaatatcaaatgtaatgataaccataaaatacttaaaagagtgattggcacacggaagtattcaataaatgttagttattggccaggcatggatgattcacgcctgaaatcccagaactttgggaggctgaggcaggcggatcacttgcggtcagaagttcaaaaccagcctggccaacatggtgaaaccccgtctctactagaaatacaaaaagttagccaagtgtattggcgggcacctgtaaccccagctacccagaaggctgaggtggggagaattgcttgaaccagggaggcagaggttgcggtgagctgagattgcaccactgcactcccagtctgggcaacagagagagactctgtctcaaaaattaaataaacaaataaatgatagttaagttaacctaggctatttttttaaaaaaattttggtttctatccacctttttcgtataaattgagccaggttacaccttagacctattagatcagaatcaggcatcaggattgctaaagctccccaggggaccccagtgtgtggatgaggttgagaatcattgttttggtccagtctttccattttaaagtgaggcaactggagctgaatagggaaatcgagtcactgaggatcacccagccaggaccagggcccaagttcctattcccatttaccgctgatggagctcaccgtggtcatgagttcaggacctggctctgtgtctggaggaaggtctggcctcgagtcagcccttgtccagaatatctggccaggtgaccccctctccatgcagcccaggaggcagatggtcagctctatgattggaagaatgtgagtgactcagggatcttgtgttgtgttgtgttgtgtgtgggtcaccaaaaccgagacccagctttctcctgggagacaacagggtagccaaggacttatttttttgttttgttttgttttgttttttgagacagagtcttgctgggttgcccaggctgaactacaatggtaaaatcttggctcactgcaacttctgcctcccaggttcaagtgattctcctgcctcagcctccggagttgctgggactacaggcatgcgccaccacgcccggctaatttttgtattttttgtagagacagggcttcaccatgctggccaggctggtcttgaattcctgacctcaagtgatctgcccacctcagcctcccaaagtgctgggattacaggcgtgagccacagcacctggccaactttctagtgttctcgggagacctttgcccactcaagtctccagtctctcgggggaagcagtcagtgtgagagaaggaacacagggccccgagccaagccctgctctgcgcctccctcgcgggcaatgagtctttgcatcaaacactcaaagtttctgaacttctgagaaaacaagtgccttgaggtgaatcctatagcacagctgtcaccagcctgtggtcattttggagggtatgtggcataggtttgtcccagggtctcagttgtcctcatctgtagagtggggataataacagctgaccttccctatcccacacagagcgttattgtgaggagtctgatggacctggatgaattctgaataggagaaagatgggtacatggatgcccaaatgcaggctcacccccacccctctcagtagcagaagacatgcatatgggagaagctgcatttcctcccagcctcactgtgctctaggtgtccagccctcattgttaggggatgtcactgttgtacctctggataaacagctgctctcatgccacctttgccagttgtcccttcagctgggcgagccctttccagggcatgactgccccaaggagggccagaggggactgggcaatagcagggacatggagggacgaggccccagatcagccacttcctcctgcaagggaagtcaaaccctttctctcataagtgtcaggctggctgcacggtccctgggctggcagggcaggtttcttgggggccctagcaggaagcactcttgcttcccaaggtaaagacaagtttcttatcactggcggtggttttctggttagaggcagcaggcagcggttacaaactttgcctagagctctgggatctgcaagccagggagggggaggcagacgacagagctagagtgagctcagcagagcttgcttagggaggaaggacccgctgtcacttcccgaaagctgggccagcctctaggcggggagaaggtcagagtggccctcccttctgcctcggggtttgcccaggctcttcagagcacagaatttacagtaaatgttgtcaccagtggaaactctcagagggggcgaagaaaagggctagaggaaggagccaggactcccggcccccagttcccgtcttaccaacaccccctagtctcatcgtgttgcttgatcttacctttcggtaaagaggggatgccctccttctgggatgtgccaggaaatacccaaatggtaaaatgaatgagccggccacaccttgcagaaggcagggctgtgactccatcatcgtggctcttgataactcctctgccccgttttagaggggcttcctttgtactgaccttggcacactttctagctcagagccccattcaagaaatgccaggttgaggctgagcatgcttgtgtctgtccttcacagatgatggaacctggcttgatgagcaaggccatgttggtatatgcttctctgccatttagaaagaccccccccaggatgtggggtttaagatgattgacagtataaccgattaacctcattagcctacagctcatgcacctgatggattcgttagggcaaattttattttattattttattttattttttgagagaggacctcactccatcagtgaggctggagtgcagtggcatgatcatggctcactgcagcctccaacccctggtgctccatagctaattttcttttatttttattattgtagatactgggtctcaataatgttgcacaggctggtcttaaactcctgggctctcaggaggtagaggttgcagtgagctgagatcgcaccattgtactccagcctgggagacagagcaagactgtctcaaaaaaaaaaacccaaaaaaccaaaaaactgctgggctcaagcgatcctctcacctcggcctcccaaagtgctgggattataggtgtgagccactgcacccagcctatttagggcaaattttaaatgtcaagttatcttacatctgctcaccacccaccctatttttgagttaccttcttcattccagcagatgatgtcataagtctgtcagtcaacaaacatctgagttcatactatgtgccaggcattgagccaggcattaacaaataggcatttaataagtgcttgaataattaaaacaaatttaaaataatatttaactagtgctttccaacttgcctgatcattagaatgacctgtggcactagttaaaaatccaaatttcactccctagtagtctagtggctaggatttaaaaaaaaaattattattatttttttaattcagctctgcagccaggcatggtggctcacgcctgtaatcccagcactttgggagaccaaggtgggcagatcccctgaggtcaggagttcaagaccagcctggccaacatggtgaaaccccgtctctactaaaaatacaaaaactagccaggcgtggtggtgcctgcctgtaatcccagcaactcgggaggttgaggcaggagaactgcttgaacctgggaggcagaggttgcagtgagccaagatcacactactgcactccagcctgggtgacagagtgagactgtctcaaaaaaaaaaaaaaaaaaaaaaaaattcagatctgcagacttcactccgcaaatcccaaaaccactgattcacattcctagattttaggatgggcctgaaattctattcttaacaagccttcaaattaattctcatgatatggcaagtttgggaaatactgacctaatccaaatagatttagaaaggtaagacctggtctccaaatatcaggttgccttttgaactgaaattttttttttttttttttttttgcatctccaatgatatttgcctttcctctgtggttaccaatgcttagcagagaaagtctgtttggttgagtcgaataatgtaaaccttaaaattataccggaattgcgatctcctgggctttctgaggatgggattgcttttccataattgctaattaccagattgcaattgttgattaattaatgatgtgatcagaaatcagcacttcttagcaggcatttttctgattagcatgtatttgatggttcccccaagcaacagggaaaagagtttccagaaaaaagagaagctcacaggcttgggacacccccaaaataccgtcagaatgctttctggtaggccggacagggtggaacaaaacgttgtagcagactttgaccatttagtatttatttatttcatttttatttttatttttatttttgagatggagtcttgctttgtcacccaggctggagtgcagtggcatgatctcggctcactgcagcctctgcctcctgggtttcagcaattctcttccccgagcctcccgggtagctgggattacaggtgtgcaccaccacgcctggttaatttttttttttttttttttttgtatttttagagacagggtttcaccatgttggccaggctggtctcgaactcctgacttcaggtgatccacccacctccgcctcccaaaatgctaggattataggcatgagccaccgcacctggccccatttactatttataaagaccctgagcattctagaatctgggtgcagtagacaagtatccagtgactttatttgtaagacgaaatgcagacaccgggagcttttggaaaacacgtggcataacacagtggaaaagagtgaaactggtgtaagacgttctcacaaacgaccttccatttccttaggctctggcctgccagctgctttcccttgctgtattcccgccacctcccacccacacaccctcacagagacccctacatgcatacacgcagaggaacacactcacacacacccctctatcaggttgaaccatatgaaattgcttttttgccgggaggagagatgtagtcttgctgtgttgcccaggctggagtgcagtggctcaatctcggctcactgcaacctctgcctccctggttcaagtaatgcttctgtttcagcctcctgagtagctgggactacaggcgcactgccacacccagctaatttctgtttttgtattttagtagagacagggttttgccacgttgcccaggctggtctcaaactccccacctcaggcaatccgcccgcctcggcctcctaaagggctaggattacaggggtaagccaccgcgcccggcctgaaattgctattcttataggtcacaacagacaaatatcagcagcttcacgtggttcagcctcatatctatgtgtatacatgcacacccacccatgtgcttacgtaaacgcgcccatacacacctacaaacatatatacacttgtgcacacattcacacgtgcaggaaaattctctggtgcccttctccatggctgtgctagtgaacaactaatctggcccctcctgtgtccctccgcaccccacccaccttgcctccttcctagacactaacctccggtgctgatccccacccctacaggagagcgaagacctggagaaacagaacgcggctctacgcaaggagatcaagcagctcacagaggaactgaagtacttcacgtcggtgctgaacagccacgagcccctgtgctcggtgctggccgccagcacgccctcgccccccgaggtggtgtacagcgcccacgcattccaccaacctcatgtcagctccccgcgcttccagccctgagcttccgatgcggggagagcagagcctcgggaggggcacacagactgtggcagagctgcgcccatcccgcagaggcccctgtccacctggagacccggagacagaggcctggacaaggagtgaacacgggaactgtcacgactggaagggcgtgaggcctcccagcagtgccgcagcgtttcgaggggcgtgtgctggaccccaccactgtgggttgcaggcccaatgcagaagagtattaagaaagatgctcaagtcccatggcacagagcaaggcgggcagggaacggttatttttctaaataaatgctttaaaagaaaccagtctgacaaggcagtttctctctttcaccctgtcccttgacactctaaattctgcgatgttgggaccttctttgttttttggactctagtaccctcaaagagctctagggactccactaacagctcctcttttccatggtttattgatgtacttgggaagctttcaattccttctctaggtgtctccttctccttctccttctccttctcctcctcctcctcctcctttctcctcctcctcctcttctcccccttctcctcctcctcctccttcttcttgacagaatttctcagatcttggctcaggctggagtgcagtggtacgatctccgctcactgcaacctccgactcccaggttcaagagaccctcttgcttcagcctccctagcagctgagactacaggcacgcaccactatgcccagctaatttttttatttttagtagagacaaggtttcaccatgttggtcaggctggtctcgaactcctggcctgaagtgatccacccgcctgggcctccaaagtgctgggattacaggcatgagtcaccatgcccagcctaggtgtcttctggattgccctcccatgctcccctcac

SEQ ID NO: 836 - protein, 21 aa, synthetic construct
MALPVTALLLPLALLLHAARP

SEQ ID NO: 837 - protein, 242 aa, synthetic construct
DIQMTQTTSSLSASLGDRVTISCRASQDISKYLNWYQQKPDGTVKLLIYHTSRLHSGVPSRFSGSGSGTDYSLTISNLEQEDIATYFCQQGNTLPYTFGGGTKLEITGGGGSGGGGSGGGGSEVKLQESGPGLVAPSQSLSVTCTVSGVSLPDYGVSWIRQPPRKGLEWLGVIWGSETTYYNSALKSRLTIIKDNSKSQVFLKMNSLQTDDTAIYYCAKHYYYGGSYAMDYWGQGTSVTVSS

SEQ ID NO: 838 - protein, 45 aa, synthetic construct
TTTPAPRPPTPAPTIASQPLSLRPEACRPAAGGAVHTRGLDFACD

SEQ ID NO: 839 - protein, 27 aa, synthetic construct
FWVLVVVGGVLACYSLLVTVAFIIFWV

SEQ ID NO: 840 - protein, 41 aa, synthetic construct
RSKRSRLLHSDYMNMTPRRPGPTRKHYQPYAPPRDFAAYRS

SEQ ID NO: 841 - protein, 112 aa, synthetic construct
RVKFSRSADAPAYQQGQNQLYNELNLGRREEYDVLDKRRGRDPEMGGKPRRKNPQEGLYNELQKDKMAEAYSEIGMKGERRRGKGHDGLYQGLSTATKDTYDALHMQALPPR

SEQ ID NO: 842 - protein, 358 aa, synthetic construct
MALPVTALLLPLALLLHAARPGSRKVCNGIGIGEFKDSLSINATNIKHFKNCTSISGDLHILPVAFRGDSFTHTPPLDPQELDILKTVKEITGFLLIQAWPENRTDLHAFENLEIIRGRTKQHGQFSLAVVSLNITSLGLRSLKEISDGDVIISGNKNLCYANTINWKKLFGTSGQKTKIISNRGENSCKATGQVCHALCSPEGCWGPEPRDCVSCRNVSRGRECVDKCNLLEGEPREFVENSECIQCHPECLPQAMNITCTGRGPDNCIQCAHYIDGPHCVKTCPAGVMGENNTLVWKYADAGHVCHLCHPNCTYGCTGPGLEGCPTNGPKIPSIATGMVGALLLLLVVALGIGLFM

SEQ ID NO: 843 - protein, 21 aa, synthetic construct
MALPVTALLLPLALLLHAARP

SEQ ID NO: 844 - protein, 236 aa, synthetic construct
QVQLQQSGPGLVKPSQTLSLTCAISGDSVSSNSAAWNWIRQSPSRGLEWLGRTYYRSKWYNDYAVSVKSRITINPDTSKNQFSLQLNSVTPEDTAVYYCAREVTGDLEDAFDIWGQGTMVTVSSGGGGSDIQMTQSPSSLSASVGDRVTITCRASQTIWSYLNWYQQRPGKAPNLLIYAASSLQSGVPSRFSGRGSGTDFTLTISSLQAEDFATYYCQQSYSIPQTFGQGTKLEIK

SEQ ID NO: 845 - protein, 45 aa, synthetic construct; identical to SEQ ID NO: 838

SEQ ID NO: 846 - protein, 24 aa, synthetic construct
IYIWAPLAGTCGVLLLSLVITLYC

SEQ ID NO: 847 - protein, 42 aa, synthetic construct
KRGRKKLLYIFKQPFMRPVQTTQEEDGCSCRFPEEEEGGCEL

SEQ ID NO: 848 - protein, 112 aa, synthetic construct; identical to SEQ ID NO: 841

SEQ ID NO: 849 - protein, 358 aa, synthetic construct; identical to SEQ ID NO: 842

SEQ ID NO: 850 - protein, 22 aa, synthetic construct
MLLLVTSLLLCELPHPAFLLIP

SEQ ID NO: 851 - protein, 248 aa, synthetic construct
QEQLVESGGRLVTPGGSLTLSCKASGFDFSAYYMSWVRQAPGKGLEWIATIYPSSGKTYYATWVNGRFTISSDNAQNTVDLQMNSLTAADRATYFCARDSYADDGALFNIWGPGTLVTISSGGGGSGGGGSGGGGSELVLTQSPSVSAALGSPAKITCTLSSAHKTDTIDWYQQLQGEAPRYLMQVQSDGSYTKRPGVPDRFSGSSSGADRYLIIPSVQADDEADYYCGADYIGGYVFGGGTQLTVTG

SEQ ID NO: 852 - protein, 40 aa, synthetic construct
ESKYGPPCPPCPMFWVLVVVGGVLACYSLLVTVAFIIFWV

SEQ ID NO: 853 - protein, 41 aa, synthetic construct; identical to SEQ ID NO: 840

SEQ ID NO: 854 - protein, 112 aa, synthetic construct; identical to SEQ ID NO: 841

SEQ ID NO: 855 - protein, 357 aa, synthetic construct
MLLLVTSLLLCELPHPAFLLIPRKVCNGIGIGEFKDSLSINATNIKHFKNCTSISGDLHILPVAFRGDSFTHTPPLDPQELDILKTVKEITGFLLIQAWPENRTDLHAFENLEIIRGRTKQHGQFSLAVVSLNITSLGLRSLKEISDGDVIISGNKNLCYANTINWKKLFGTSGQKTKIISNRGENSCKATGQVCHALCSPEGCWGPEPRDCVSCRNVSRGRECVDKCNLLEGEPREFVENSECIQCHPECLPQAMNITCTGRGPDNCIQCAHYIDGPHCVKTCPAGVMGENNTLVWKYADAGHVCHLCHPNCTYGCTGPGLEGCPTNGPKIPSIATGMVGALLLLLVVALGIGLFM

SEQ ID NO: 856 - DNA, 63 bp, synthetic construct
  source 1..63: mol_type = other DNA
atggccctgcccgtgaccgccctgctgctgcccctggccctgctgctgcacgccgccaggccc

SEQ ID NO: 857 - DNA, 726 bp, synthetic construct
  source 1..726: mol_type = other DNA
gacatccagatgacccagactaccagctccctgagcgccagtctgggcgatcgggtgaccatcagctgcagggccagccaggacatctccaagtacctgaattggtaccaacagaaacccgacggcaccgtgaagctgctgatctaccacacctctaggctgcacagcggggtgcccagccgcttcagcggaagtggcagtggcaccgactactccctgaccatcagcaacctggagcaggaggacattgccacctacttctgccagcagggcaacaccctgccctacaccttcggcggcggcaccaagctggagatcacaggcgggggcggctctggcgggggcggcagcgggggcgggggctccgaggtgaagctgcaggagtccggccccggcctggtggcccccagccagagcctgtccgtgacctgtaccgtgtccggggtgtccctgcccgactatggcgtgagctggatccgccagccacccaggaagggcctggagtggctgggcgtgatctggggcagcgagaccacctactacaatagcgccctgaagagcaggctgaccatcatcaaggacaacagcaagagccaggtgttcctgaagatgaacagcctgcagaccgacgacaccgccatctactactgtgccaagcactactactatggcggcagctacgccatggactactgggggcagggcacctccgtgaccgtgagtagc

SEQ ID NO: 858 - DNA, 135 bp, synthetic construct
  source 1..135: mol_type = other DNA
accaccaccccagcaccccgcccacccaccccagccccaacaatcgcaagccagcccctgtccctgcggcccgaggcctgccggcccgccgccggcggcgccgtgcacaccaggggcctggacttcgcttgcgat

SEQ ID NO: 859 - DNA, 81 bp, synthetic construct
  source 1..81: mol_type = other DNA
ttttgggtgctggtggtggtgggcggggtgctggcctgctactccctgctggtgaccgtggccttcatcatcttctgggtg

SEQ ID NO: 860 - DNA, 123 bp, synthetic construct
  source 1..123: mol_type = other DNA
cgctccaagcggagcaggctgctgcacagcgactacatgaacatgacacccagaagacccggccccacacggaagcattaccagccctacgcccctccccgcgacttcgccgcctaccggagc

SEQ ID NO: 861 - DNA, 336 bp, synthetic construct
  source 1..336: mol_type = other DNA
cgggtgaagttcagccgctccgccgatgcccctgcctaccagcaggggcagaatcagctgtacaacgagctgaacctgggccggcgcgaggagtacgacgtgctggacaagcgccggggccgcgacccagagatgggcggcaagccccggcggaagaatccccaggagggcctgtacaacgagctccagaaggacaagatggccgaggcctacagcgagatcggcatgaagggcgagcggagacgcgggaaggggcacgacggcctgtaccagggcctgtccaccgccaccaaggacacctacgacgccctgcacatgcaggccctgcccccccgc

SEQ ID NO: 862 - DNA, 1074 bp, synthetic construct
  source 1..1074: mol_type = other DNA
atggccctgcctgtgacagctctgctgcttcctctggcactgctgctgcatgctgccagaccaggcagcagaaaagtgtgcaacggcatcggcatcggagagttcaaggacagcctgagcatcaacgccaccaacatcaagcacttcaagaactgcaccagcatcagcggcgacctgcacattctgcctgtggcctttagaggcgacagcttcacccacacacctccactcgatccccaggagctggacatcctgaaaaccgtgaaagagatcaccggctttctgctgatccaggcttggcccgagaaccggacagatctgcacgccttcgagaacctggaaatcatcagaggccggaccaagcagcacggccagttttctctggctgtggtgtccctgaacatcaccagcctgggcctgagaagcctgaaagaaatcagcgacggcgacgtgatcatctccggcaacaagaacctgtgctacgccaacaccatcaactggaagaagctgttcggcaccagcggccagaaaacaaagatcatcagcaaccggggcgagaacagctgcaaggctacaggccaagtgtgccacgctctgtgtagccctgaaggctgttggggacccgagcctagagattgcgtgtcctgcagaaacgtgtcccggggcagagaatgcgtggacaagtgcaatctgctggaaggcgagccccgcgagttcgtggaaaacagcgagtgcatccagtgtcaccccgagtgtctgccccaggccatgaacattacctgtaccggcagaggccccgacaactgtattcagtgcgcccactacatcgacggccctcactgcgtgaaaacatgtcctgctggcgtgatgggagagaacaacaccctcgtgtggaagtatgccgacgccggacatgtgtgccacctgtgtcaccctaattgcacctacggctgtacaggccctggcctggaaggctgtccaacaaacggacctaagatcccctctatcgccaccggcatggttggagccttgctgcttctgctggtggtggcccttggcatcggcctgtttatg

SEQ ID NO: 863 - DNA, 63 bp, synthetic construct
  source 1..63: mol_type = other DNA
atggcccttccagtaactgcccttctgttgccacttgctcttctccttcacgcggcgcgccca

SEQ ID NO: 864 - DNA, 708 bp, synthetic construct
  source 1..708: mol_type = other DNA
caggtgcagctgcagcagagcggcccgggcctggtgaaaccgagccagaccctgagcctgacctgcgcgattagcggcgatagcgtgagcagcaacagcgcggcgtggaactggattcgccagagcccgagccgcggcctggaatggctgggccgcacctattatcgcagcaaatggtataacgattatgcggtgagcgtgaaaagccgcattaccattaacccggataccagcaaaaaccagtttagcctgcagctgaacagcgtgaccccggaagataccgcggtgtattattgcgcgcgcgaagtgaccggcgatctggaagatgcgtttgatatttggggccagggcaccatggtgaccgtgtcgtccggcggaggcgggtcagatattcagatgacccagtcacccagttcactctctgcgtccgttggagatagagtcacaattacatgtcgcgcgagccagacgatttggagttacctcaattggtatcagcagcgcccgggcaaagcgccgaacctgctgatttatgcggcgagcagcctgcagagcggcgtgccgagccgctttagcggccgcggcagcggcaccgattttaccctgaccattagcagcctgcaggcggaagattttgcgacctattattgccagcagagctatagcattccgcagacctttggccagggcaccaaactggaaattaaa

SEQ ID NO: 865 - DNA, 135 bp, synthetic construct
  source 1..135: mol_type = other DNA
acgactacaccagctccacgcccgccaactccagcacctacaattgcatcacaacctctgagcttgaggcctgaggcatgtagacctgccgctggaggtgctgtgcatacacgcggactggattttgcttgcgat

SEQ ID NO: 866 - DNA, 72 bp, synthetic construct
  source 1..72: mol_type = other DNA
atttatatttgggccccattggctgggacctgcggcgtcttgctcctgtctcttgtcattactttgtattgc

SEQ ID NO: 867 - DNA, 126 bp, synthetic construct
  source 1..126: mol_type = other DNA
aagcgcggaaggaaaaagttgttgtatatctttaagcaacccttcatgcgcccggttcagacaacacaggaagaggacggatgctcttgtaggtttcctgaggaagaagagggcgggtgcgaactc

SEQ ID NO: 868 - DNA, 336 bp, synthetic construct
  source 1..336: mol_type = other DNA
agagtcaaattttcacgctccgccgatgcacctgcataccagcaagggcaaaatcaactgtacaacgaactgaacctcggcaggcgggaagaatacgacgtgctcgacaaacgacgcgggagagaccccgaaatgggtggcaaaccccgccggaaaaatccacaggagggcttgtataacgaacttcaaaaggacaagatggctgaagcttactcagaaatcggtatgaagggagaacggaggcgcggtaaaggccacgacggattgtaccaaggactgtctaccgctacaaaagacacttacgatgcactgcatatgcaagcactcccgccgaga

SEQ ID NO: 869 - DNA, 1074 bp, synthetic construct; identical to SEQ ID NO: 862
  source 1..1074: mol_type = other DNA

SEQ ID NO: 870 - DNA, 66 bp, synthetic construct
  source 1..66: mol_type = other DNA
atgctgctgctggtgacaagcctgctgctgtgcgagctgccccaccccgcctttctgctgatcccc

SEQ ID NO: 871 - DNA, 744 bp, synthetic construct
  source 1..744: mol_type = other DNA
caggaacagctcgtcgaaagcggcggcagactggtgacacctggcggcagcctgaccctgagctgcaaggccagcggcttcgacttcagcgcctactacatgagctgggtccgccaggcccctggcaagggactggaatggatcgccaccatctaccccagcagcggcaagacctactacgccacctgggtgaacggacggttcaccatctccagcgacaacgcccagaacaccgtggacctgcagatgaacagcctgacagccgccgaccgggccacctacttttgcgccagagacagctacgccgacgacggcgccctgttcaacatctggggccctggcaccctggtgacaatctctagcggcggaggcggatctggtggcggaggaagtggcggcggaggatctgagctggtgctgacccagagcccctctgtgtctgctgccctgggaagccctgccaagatcacctgtaccctgagcagcgcccacaagaccgacaccatcgactggtatcagcagctgcagggcgaggcccccagatacctgatgcaggtgcagagcgacggcagctacaccaagaggccaggcgtgcccgaccggttcagcggatctagctctggcgccgaccgctacctgatcatccccagcgtgcaggccgatgacgaggccgattactactgtggcgccgactacatcggcggctacgtgttcggcggaggcacccagctgaccgtgaccggc

SEQ ID NO: 872 - DNA, 120 bp, synthetic construct
  source 1..120: mol_type = other DNA
gagtctaagtacggaccgccctgccccccttgccctatgttctgggtgctggtggtggtgggcggggtgctggcctgctacagcctgctggtgacagtggccttcatcatcttttgggtg

SEQ ID NO: 873 - DNA, 123 bp, synthetic construct
  source 1..123: mol_type = other DNA
cggagcaagcggagcaggctgctgcattcggattacatgaacatgaccccaaggaggcctggtccgactcggaagcactaccagccctatgccccgcctcgcgatttcgccgcctaccgctca

SEQ ID NO: 874 - DNA, 336 bp, synthetic construct
  source 1..336: mol_type = other DNA
cgggtgaagttcagcagaagcgccgacgcccctgcctaccagcagggccagaatcagctgtacaacgagctgaacctgggcagaagggaagagtacgacgtcctggataagcggagaggccgggaccctgagatgggcggcaagcctcggcggaagaacccccaggaaggcctgtataacgaactgcagaaagacaagatggccgaggcctacagcgagatcggcatgaagggcgagcggaggcggggcaagggccacgacggcctgtatcagggcctgtccaccgccaccaaggatacctacgacgccctgcacatgcaggccctgcccccaagg

SEQ ID NO: 875 - DNA, 1072 bp, synthetic construct
  source 1..1072: mol_type = other DNA
atgcttctcctggtgacaagccttctgctctgtgagttaccacacccagcattcctcctgatcccacgcaaagtgtgtaacggaataggtattggtgaatttaaagactcactctccataaatgctacgaatattaaacacttcaaaaactgcacctccatcagtggcgatctccacatcctgccggtggcatttaggggtgactccttcacacatactcctcctctggatccacaggaactggatattctgaaaaccgtaaaggaaatcacagggtttttgctgattcaggcttggcctgaaaacaggacggacctccatgcctttgagaacctagaaatcatacgcggcaggaccaagcaacatggtcagttttctcttgcagtcgtcagcctgaacataacatccttgggattacgctccctcaaggagataagtgatggagatgtgataatttcaggaaacaaaaatttgtgctatgcaaatacaataaactggaaaaaactgtttgggacctccggtcagaaaaccaaaattataagcaacagaggtgaaaacagctgcaaggccacaggccaggtctgccatgccttgtgctcccccgagggctgctggggcccggagcccagggactgcgtctcttgccggaatgtcagccgaggcagggaatgcgtggacaagtgcaaccttctggagggtgagccaagggagtttgtggagaactctgagtgcatacagtgccacccagagtgcctgcctcaggccatgaacatcacctgcacaggacggggaccagacaactgtatccagtgtgcccactacattgacggcccccactgcgtcaagacctgcccggcaggagtcatgggagaaaacaacaccctggtctggaagtacgcagacgccggccatgtgtgccacctgtgccatccaaactgcacctacggatgcactgggccaggtcttgaaggctgtccaacgaatgggcctaagatcccgtccatcgccactgggatggtgggggccctcctcttgctgctggtggtggccctggggatcggcctcttcatgv

SEQ ID NO: 876 - RNA, 20 nt, synthetic construct
  source 1..20: mol_type = other RNA
cctaaagttaattatgtacc

SEQ ID NO: 877 - RNA, 20 nt, synthetic construct
  source 1..20: mol_type = other RNA
ggatgccagttccttggacc

SEQ ID NO: 878 - RNA, 20 nt, synthetic construct
  source 1..20: mol_type = other RNA
gctaggggatgccagttcct

SEQ ID NO: 879 - RNA, 20 nt, synthetic construct
  source 1..20: mol_type = other RNA
tgggcagcagtaagggctag

SEQ ID NO: 880 - RNA, 20 nt, synthetic construct
  source 1..20: mol_type = other RNA
ttgggcagcagtaagggcta

SEQ ID NO: 881 - RNA, 76 nt, synthetic construct; identical to SEQ ID NO: 319
  source 1..76: mol_type = other RNA

SEQ ID NO: 882 - RNA, 116 nt, synthetic construct
  source 1..116: mol_type = other RNA
cctaaagttaattatgtaccgttttagagctagaaatagcaagttaaaataaggctagtccgttatcaacttgaaaaagtggcaccgagtcggtgctggaccaggcacataattaa

SEQ ID NO: 883 - RNA, 117 nt, synthetic construct
  source 1..117: mol_type = other RNA
cctaaagttaattatgtaccgttttagagctagaaatagcaagttaaaataaggctagtccgttatcaacttgaaaaagtggcaccgagtcggtgctggaccaggcacataattaac

SEQ ID NO: 884 - RNA, 118 nt, synthetic construct
  source 1..118: mol_type = other RNA
cctaaagttaattatgtaccgttttagagctagaaatagcaagttaaaataaggctagtccgttatcaacttgaaaaagtggcaccgagtcggtgctggaccaggcacataattaact

SEQ ID NO: 885 - RNA, 119 nt, synthetic construct
  source 1..119: mol_type = other RNA
cctaaagttaattatgtaccgttttagagctagaaatagcaagttaaaataaggctagtccgttatcaacttgaaaaagtggcaccgagtcggtgctggaccaggcacataattaactt

SEQ ID NO: 886 - RNA, 120 nt, synthetic construct
  source 1..120: mol_type = other RNA
cctaaagttaattatgtaccgttttagagctagaaatagcaagttaaaataaggctagtccgttatcaacttgaaaaagtggcaccgagtcggtgctggaccaggcacataattaacttt

SEQ ID NO: 887 - RNA, 121 nt, synthetic construct
  source 1..121: mol_type = other RNA
cctaaagttaattatgtaccgttttagagctagaaatagcaagttaaaataaggctagtccgttatcaacttgaaaaagtggcaccgagtcggtgctggaccaggcacataattaacttta

SEQ ID NO: 888 - RNA, 117 nt, synthetic construct
  source 1..117: mol_type = other RNA
cctaaagttaattatgtaccgttttagagctagaaatagcaagttaaaataaggctagtccgttatcaacttgaaaaagtggcaccgagtcggtgcttggaccaggcacataattaa

SEQ ID NO: 889 - RNA, 118 nt, synthetic construct
  source 1..118: mol_type = other RNA
cctaaagttaattatgtaccgttttagagctagaaatagcaagttaaaataaggctagtccgttatcaacttgaaaaagtggcaccgagtcggtgcttggaccaggcacataattaac

SEQ ID NO: 890 - RNA, 119 nt, synthetic construct
  source 1..119: mol_type = other RNA
cctaaagttaattatgtaccgttttagagctagaaatagcaagttaaaataaggctagtccgttatcaacttgaaaaagtggcaccgagtcggtgcttggaccaggcacataattaact

SEQ ID NO: 891 - RNA, 120 nt, synthetic construct
  source 1..120: mol_type = other RNA
cctaaagttaattatgtaccgttttagagctagaaatagcaagttaaaataaggctagtccgttatcaacttgaaaaagtggcaccgagtcggtgcttggaccaggcacataattaactt

SEQ ID NO: 892 - RNA, 121 nt, synthetic construct
  source 1..121: mol_type = other RNA
cctaaagttaattatgtaccgttttagagctagaaatagcaagttaaaataaggctagtccgttatcaacttgaaaaagtggcaccgagtcggtgcttggaccaggcacataattaacttt

SEQ ID NO: 893 - RNA, 122 nt, synthetic construct
  source 1..122: mol_type = other RNA
cctaaagttaattatgtaccgttttagagctagaaatagcaagttaaaataaggctagtccgttatcaacttgaaaaagtggcaccgagtcggtgcttggaccaggcacataattaacttta

SEQ ID NO: 894 - RNA, 118 nt, synthetic construct
  source 1..118: mol_type = other RNA
cctaaagttaattatgtaccgttttagagctagaaatagcaagttaaaataaggctagtccgttatcaacttgaaaaagtggcaccgagtcggtgccttggaccaggcacataattaa

SEQ ID NO: 895 - RNA, 119 nt, synthetic construct
  source 1..119: mol_type = other RNA
cctaaagttaattatgtaccgttttagagctagaaatagcaagttaaaataaggctagtccgttatcaacttgaaaaagtggcaccgagtcggtgccttggaccaggcacataattaac

SEQ ID NO: 896 - RNA, 120 nt, synthetic construct
  source 1..120: mol_type = other RNA
cctaaagttaattatgtaccgttttagagctagaaatagcaagttaaaataaggctagtccgttatcaacttgaaaaagtggcaccgagtcggtgccttggaccaggcacataattaact

SEQ ID NO: 897 - RNA, 121 nt, synthetic construct
  source 1..121: mol_type = other RNA
cctaaagttaattatgtaccgttttagagctagaaatagcaagttaaaataaggctagtccgttatcaacttgaaaaagtggcaccgagtcggtgccttggaccaggcacataattaactt

SEQ ID NO: 898 - RNA, 122 nt, synthetic construct
  source 1..122: mol_type = other RNA
cctaaagttaattatgtaccgttttagagctagaaatagcaagttaaaataaggctagtccgttatcaacttgaaaaagtggcaccgagtcggtgccttggaccaggcacataattaacttt

SEQ ID NO: 899 - RNA, 123 nt, synthetic construct
  source 1..123: mol_type = other RNA
cctaaagttaattatgtaccgttttagagctagaaatagcaagttaaaataaggctagtccgttatcaacttgaaaaagtggcaccgagtcggtgccttggaccaggcacataattaacttta

SEQ ID NO: 900 - RNA, 119 nt, synthetic construct
  source 1..119: mol_type = other RNA
cctaaagttaattatgtaccgttttagagctagaaatagcaagttaaaataaggctagtccgttatcaacttgaaaaagtggcaccgagtcggtgcccttggaccaggcacataattaa

SEQ ID NO: 901 - RNA, 120 nt, synthetic construct
  source 1..120: mol_type = other RNA
cctaaagttaattatgtaccgttttagagctagaaatagcaagttaaaataaggctagtccgttatcaacttgaaaaagtggcaccgagtcggtgcccttggaccaggcacataattaac

SEQ ID NO: 902 - RNA, 121 nt, synthetic construct
  source 1..121: mol_type = other RNA
cctaaagttaattatgtaccgttttagagctagaaatagcaagttaaaataaggctagtccgttatcaacttgaaaaagtggcaccgagtcggtgcccttggaccaggcacataattaact

SEQ ID NO: 903 - RNA, 122 nt, synthetic construct
  source 1..122: mol_type = other RNA
cctaaagttaattatgtaccgttttagagctagaaatagcaagttaaaataaggctagtccgttatcaacttgaaaaagtggcaccgagtcggtgcccttggaccaggcacataattaactt

SEQ ID NO: 904 - RNA, 123 nt, synthetic construct
  source 1..123: mol_type = other RNA
cctaaagttaattatgtaccgttttagagctagaaatagcaagttaaaataaggctagtccgttatcaacttgaaaaagtggcaccgagtcggtgcccttggaccaggcacataattaacttt

SEQ ID NO: 905 - RNA, 124 nt, synthetic construct
  source 1..124: mol_type = other RNA
cctaaagttaattatgtaccgttttagagctagaaatagcaagttaaaataaggctagtccgttatcaacttgaaaaagtggcaccgagtcggtgcccttggaccaggcacataattaacttta

SEQ ID NO: 906 - RNA, 120 nt, synthetic construct
  source 1..120: mol_type = other RNA
cctaaagttaattatgtaccgttttagagctagaaatagcaagttaaaataaggctagtccgttatcaacttgaaaaagtggcaccgagtcggtgctccttggaccaggcacataattaa

SEQ ID NO: 907 - RNA, 121 nt, synthetic construct
  source 1..121: mol_type = other RNA
cctaaagttaattatgtaccgttttagagctagaaatagcaagttaaaataaggctagtccgttatcaacttgaaaaagtggcaccgagtcggtgctccttggaccaggcacataattaac

SEQ ID NO: 908 - RNA, 122 nt, synthetic construct
  source 1..122: mol_type = other RNA
cctaaagttaattatgtaccgttttagagctagaaatagcaagttaaaataaggctagtccgttatcaacttgaaaaagtggcaccgagtcggtgctccttggaccaggcacataattaact

SEQ ID NO: 909 - RNA, 123 nt, synthetic construct
  source 1..123: mol_type = other RNA
cctaaagttaattatgtaccgttttagagctagaaatagcaagttaaaataaggctagtccgttatcaacttgaaaaagtggcaccgagtcggtgctccttggaccaggcacataattaactt

SEQ ID NO: 910 - RNA, 124 nt, synthetic construct
  source 1..124: mol_type = other RNA
cctaaagttaattatgtaccgttttagagctagaaatagcaagttaaaataaggctagtccgttatcaacttgaaaaagtggcaccgagtcggtgctccttggaccaggcacataattaacttt

SEQ ID NO: 911 - RNA, 125 nt, synthetic construct
  source 1..125: mol_type = other RNA
cctaaagttaattatgtaccgttttagagctagaaatagcaagttaaaataaggctagtccgttatcaacttgaaaaagtggcaccgagtcggtgctccttggaccaggcacataattaacttta

SEQ ID NO: 912 - RNA, 121 nt, synthetic construct
  source 1..121: mol_type = other RNA
cctaaagttaattatgtaccgttttagagctagaaatagcaagttaaaataaggctagtccgttatcaacttgaaaaagtggcaccgagtcggtgcttccttggaccaggcacataattaa

SEQ ID NO: 913 - RNA, 122 nt, synthetic construct
  source 1..122: mol_type = other RNA
cctaaagttaattatgtaccgttttagagctagaaatagcaagttaaaataaggctagtccgttatcaacttgaaaaagtggcaccgagtcggtgcttccttggaccaggcacataattaac

SEQ ID NO: 914 - RNA, 123 nt, synthetic construct
  source 1..123: mol_type = other RNA
cctaaagttaattatgtaccgttttagagctagaaatagcaagttaaaataaggctagtccgttatcaacttgaaaaagtggcaccgagtcggtgcttccttggaccaggcacataattaact

SEQ ID NO: 915 - RNA, 124 nt, synthetic construct
  source 1..124: mol_type = other RNA
cctaaagttaattatgtaccgttttagagctagaaatagcaagttaaaataaggctagtccgttatcaacttgaaaaagtggcaccgagtcggtgcttccttggaccaggcacataattaactt

SEQ ID NO: 916 - RNA, 125 nt, synthetic construct
  source 1..125: mol_type = other RNA
cctaaagttaattatgtaccgttttagagctagaaatagcaagttaaaataaggctagtccgttatcaacttgaaaaagtggcaccgagtcggtgcttccttggaccaggcacataattaacttt

SEQ ID NO: 917 - RNA, 126 nt, synthetic construct
  source 1..126: mol_type = other RNA
cctaaagttaattatgtaccgttttagagctagaaatagcaagttaaaataaggctagtccgttatcaacttgaaaaagtggcaccgagtcggtgcttccttggaccaggcacataattaacttta

SEQ ID NO: 918 - RNA, 122 nt, synthetic construct
  source 1..122: mol_type = other RNA
cctaaagttaattatgtaccgttttagagctagaaatagcaagttaaaataaggctagtccgttatcaacttgaaaaagtggcaccgagtcggtgcgttccttggaccaggcacataattaa

SEQ ID NO: 919 - RNA, 123 nt, synthetic construct
  source 1..123: mol_type = other RNA
cctaaagttaattatgtaccgttttagagctagaaatagcaagttaaaataaggctagtccgttatcaacttgaaaaagtggcaccgagtcggtgcgttccttggaccaggcacataattaac

SEQ ID NO: 920 - RNA, 124 nt, synthetic construct
  source 1..124: mol_type = other RNA
cctaaagttaattatgtaccgttttagagctagaaatagcaagttaaaataaggctagtccgttatcaacttgaaaaagtggcaccgagtcggtgcgttccttggaccaggcacataattaact

SEQ ID NO: 921 - RNA, 125 nt, synthetic construct
  source 1..125: mol_type = other RNA
cctaaagttaattatgtaccgttttagagctagaaatagcaagttaaaataaggctagtccgttatcaacttgaaaaagtggcaccgagtcggtgcgttccttggaccaggcacataattaactt

SEQ ID NO: 922 - RNA, 126 nt, synthetic construct
  source 1..126: mol_type = other RNA
cctaaagttaattatgtaccgttttagagctagaaatagcaagttaaaataaggctagtccgttatcaacttgaaaaagtggcaccgagtcggtgcgttccttggaccaggcacataattaacttt

SEQ ID NO: 923 - RNA, 127 nt, synthetic construct
  source 1..127: mol_type = other RNA
cctaaagttaattatgtaccgttttagagctagaaatagcaagttaaaataaggctagtccgttatcaacttgaaaaagtggcaccgagtcggtgcgttccttggaccaggcacataattaacttta

SEQ ID NO: 924 - RNA, 123 nt, synthetic construct
  source 1..123: mol_type = other RNA
cctaaagttaattatgtaccgttttagagctagaaatagcaagttaaaataaggctagtccgttatcaacttgaaaaagtggcaccgagtcggtgcagttccttggaccaggcacataattaa

SEQ ID NO: 925 - RNA, 124 nt, synthetic construct
  source 1..124: mol_type = other RNA
cctaaagttaattatgtaccgttttagagctagaaatagcaagttaaaataaggctagtccgttatcaacttgaaaaagtggcaccgagtcggtgcagttccttggaccaggcacataattaac

SEQ ID NO: 926 - RNA, 125 nt, synthetic construct
  source 1..125: mol_type = other RNA
cctaaagttaattatgtaccgttttagagctagaaatagcaagttaaaataaggctagtccgttatcaacttgaaaaagtggcaccgagtcggtgcagttccttggaccaggcacataattaact

SEQ ID NO: 927 - RNA, 126 nt, synthetic construct
  source 1..126: mol_type = other RNA
cctaaagttaattatgtaccgttttagagctagaaatagcaagttaaaataaggctagtccgttatcaacttgaaaaagtggcaccgagtcggtgcagttccttggaccaggcacataattaactt

SEQ ID NO: 928 - RNA, 127 nt, synthetic construct
  source 1..127: mol_type = other RNA
cctaaagttaattatgtaccgttttagagctagaaatagcaagttaaaataaggctagtccgttatcaacttgaaaaagtggcaccgagtcggtgcagttccttggaccaggcacataattaacttt

SEQ ID NO: 929 - RNA, 128 nt, synthetic construct
  source 1..128: mol_type = other RNA
cctaaagttaattatgtaccgttttagagctagaaatagcaagttaaaataaggctagtccgttatcaacttgaaaaagtggcaccgagtcggtgcagttccttggaccaggcacataattaacttta

SEQ ID NO: 930 - RNA, 124 nt, synthetic construct
  source 1..124: mol_type = other RNA
cctaaagttaattatgtaccgttttagagctagaaatagcaagttaaaataaggctagtccgttatcaacttgaaaaagtggcaccgagtcggtgccagttccttggaccaggcacataattaa

SEQ ID NO: 931 - RNA, 125 nt, synthetic construct
  source 1..125: mol_type = other RNA
cctaaagttaattatgtaccgttttagagctagaaatagcaagttaaaataaggctagtccgttatcaacttgaaaaagtggcaccgagtcggtgccagttccttggaccaggcacataattaac

SEQ ID NO: 932 - RNA, 126 nt, synthetic construct
  source 1..126: mol_type = other RNA
cctaaagttaattatgtaccgttttagagctagaaatagcaagttaaaataaggctagtccgttatcaacttgaaaaagtggcaccgagtcggtgccagttccttggaccaggcacataattaact

SEQ ID NO: 933 - RNA, 127 nt, synthetic construct
  source 1..127: mol_type = other RNA
cctaaagttaattatgtaccgttttagagctagaaatagcaagttaaaataaggctagtccgttatcaacttgaaaaagtggcaccgagtcggtgccagttccttggaccaggcacataattaactt

SEQ ID NO: 934 - RNA, 128 nt, synthetic construct
  source 1..128: mol_type = other RNA
cctaaagttaattatgtaccgttttagagctagaaatagcaagttaaaataaggctagtccgttatcaacttgaaaaagtggcaccgagtcggtgccagttccttggaccaggcacataattaacttt

SEQ ID NO: 935 - RNA, 129 nt, synthetic construct
  source 1..129: mol_type = other RNA
cctaaagttaattatgtaccgttttagagctagaaatagcaagttaaaataaggctagtccgttatcaacttgaaaaagtggcaccgagtcggtgccagttccttggaccaggcacataattaacttta

SEQ ID NO: 936 - RNA, 125 nt, synthetic construct
  source 1..125: mol_type = other RNA
cctaaagttaattatgtaccgttttagagctagaaatagcaagttaaaataaggctagtccgttatcaacttgaaaaagtggcaccgagtcggtgcccagttccttggaccaggcacataattaa

SEQ ID NO: 937 - RNA, 126 nt, synthetic construct
  source 1..126: mol_type = other RNA
cctaaagttaattatgtaccgttttagagctagaaatagcaagttaaaataaggctagtccgttatcaacttgaaaaagtggcaccgagtcggtgcccagttccttggaccaggcacataattaac

SEQ ID NO: 938 - RNA, 127 nt, synthetic construct
  source 1..127: mol_type = other RNA
cctaaagttaattatgtaccgttttagagctagaaatagcaagttaaaataaggctagtccgttatcaacttgaaaaagtggcaccgagtcggtgcccagttccttggaccaggcacataattaact

SEQ ID NO: 939 - RNA, 128 nt, synthetic construct
  source 1..128: mol_type = other RNA
cctaaagttaattatgtaccgttttagagctagaaatagcaagttaaaataaggctagtccgttatcaacttgaaaaagtggcaccgagtcggtgcccagttccttggaccaggcacataattaactt

SEQ ID NO: 940 - RNA, 129 nt, synthetic construct
  source 1..129: mol_type = other RNA
cctaaagttaattatgtaccgttttagagctagaaatagcaagttaaaataaggctagtccgttatcaacttgaaaaagtggcaccgagtcggtgcccagttccttggaccaggcacataattaacttt

SEQ ID NO: 941 - RNA, 130 nt, synthetic construct
  source 1..130: mol_type = other RNA
cctaaagttaattatgtaccgttttagagctagaaatagcaagttaaaataaggctagtccgttatcaacttgaaaaagtggcaccgagtcggtgcccagttccttggaccaggcacataattaacttta

SEQ ID NO: 942 - RNA, 126 nt, synthetic construct
  source 1..126: mol_type = other RNA
cctaaagttaattatgtaccgttttagagctagaaatagcaagttaaaataaggctagtccgttatcaacttgaaaaagtggcaccgagtcggtgcgccagttccttggaccaggcacataattaa

SEQ ID NO: 943 - RNA, 127 nt, synthetic construct
  source 1..127: mol_type = other RNA
cctaaagttaattatgtaccgttttagagctagaaatagcaagttaaaataaggctagtccgttatcaacttgaaaaagtggcaccgagtcggtgcgccagttccttggaccaggcacataattaac

SEQ ID NO: 944 - RNA, 128 nt, synthetic construct
  source 1..128: mol_type = other RNA
cctaaagttaattatgtaccgttttagagctagaaatagcaagttaaaataaggctagtccgttatcaacttgaaaaagtggcaccgagtcggtgcgccagttccttggaccaggcacataattaact

SEQ ID NO: 945 - RNA, 129 nt, synthetic construct
  source 1..129: mol_type = other RNA
cctaaagttaattatgtaccgttttagagctagaaatagcaagttaaaataaggctagtccgttatcaacttgaaaaagtggcaccgagtcggtgcgccagttccttggaccaggcacataattaactt

SEQ ID NO: 946 - RNA, 130 nt, synthetic construct
  source 1..130: mol_type = other RNA
cctaaagttaattatgtaccgttttagagctagaaatagcaagttaaaataaggctagtccgttatcaacttgaaaaagtggcaccgagtcggtgcgccagttccttggaccaggcacataattaacttt

SEQ ID NO: 947 - RNA, 131 nt, synthetic construct
  source 1..131: mol_type = other RNA
cctaaagttaattatgtaccgttttagagctagaaatagcaagttaaaataaggctagtccgttatcaacttgaaaaagtggcaccgagtcggtgcgccagttccttggaccaggcacataattaacttta

SEQ ID NO: 948 - RNA, 127 nt, synthetic construct
  source 1..127: mol_type = other RNA
cctaaagttaattatgtaccgttttagagctagaaatagcaagttaaaataaggctagtccgttatcaacttgaaaaagtggcaccgagtcggtgctgccagttccttggaccaggcacataattaa

SEQ ID NO: 949 - RNA, 128 nt, synthetic construct
  source 1..128: mol_type = other RNA
cctaaagttaattatgtaccgttttagagctagaaatagcaagttaaaataaggctagtccgttatcaacttgaaaaagtggcaccgagtcggtgctgccagttccttggaccaggcacataattaac

SEQ ID NO: 950 - RNA, 129 nt, synthetic construct
  source 1..129: mol_type = other RNA
cctaaagttaattatgtaccgttttagagctagaaatagcaagttaaaataaggctagtccgttatcaacttgaaaaagtggcaccgagtcggtgctgccagttccttggaccaggcacataattaact

SEQ ID NO: 951 - RNA, 130 nt, synthetic construct
  source 1..130: mol_type = other RNA
cctaaagttaattatgtaccgttttagagctagaaatagcaagttaaaataaggctagtccgttatcaacttgaaaaagtggcaccgagtcggtgctgccagttccttggaccaggcacataattaactt

SEQ ID NO: 952 - RNA, 131 nt, synthetic construct
  source 1..131: mol_type = other RNA
cctaaagttaattatgtaccgttttagagctagaaatagcaagttaaaataaggctagtccgttatcaacttgaaaaagtggcaccgagtcggtgctgccagttccttggaccaggcacataattaacttt

SEQ ID NO: 953 - RNA, 132 nt, synthetic construct
  source 1..132: mol_type = other RNA
cctaaagttaattatgtaccgttttagagctagaaatagcaagttaaaataaggctagtccgttatcaacttgaaaaagtggcaccgagtcggtgctgccagttccttggaccaggcacataattaacttta

SEQ ID NO: 954 - RNA, 128 nt, synthetic construct
  source 1..128: mol_type = other RNA
cctaaagttaattatgtaccgttttagagctagaaatagcaagttaaaataaggctagtccgttatcaacttgaaaaagtggcaccgagtcggtgcatgccagttccttggaccaggcacataattaa

SEQ ID NO: 955 - RNA, 129 nt, synthetic construct
  source 1..129: mol_type = other RNA
cctaaagttaattatgtaccgttttagagctagaaatagcaagttaaaataaggctagtccgttatcaacttgaaaaagtggcaccgagtcggtgcatgccagttccttggaccaggcacataattaac

SEQ ID NO: 956 - RNA, 130 nt, synthetic construct
  source 1..130: mol_type = other RNA
cctaaagttaattatgtaccgttttagagctagaaatagcaagttaaaataaggctagtccgttatcaacttgaaaaagtggcaccgagtcggtgcatgccagttccttggaccaggcacataattaact

SEQ ID NO: 957 - RNA, 131 nt, synthetic construct
  source 1..131: mol_type = other RNA
cctaaagttaattatgtaccgttttagagctagaaatagcaagttaaaataaggctagtccgttatcaacttgaaaaagtggcaccgagtcggtgcatgccagttccttggaccaggcacataattaactt

SEQ ID NO: 958 - RNA, 132 nt, synthetic construct
  source 1..132: mol_type = other RNA
cctaaagttaattatgtaccgttttagagctagaaatagcaagttaaaataaggctagtccgttatcaacttgaaaaagtggcaccgagtcggtgcatgccagttccttggaccaggcacataattaacttt

SEQ ID NO: 959 - RNA, 133 nt, synthetic construct
  source 1..133: mol_type = other RNA
cctaaagttaattatgtaccgttttagagctagaaatagcaagttaaaataaggctagtccgttatcaacttgaaaaagtggcaccgagtcggtgcatgccagttccttggaccaggcacataattaacttta

SEQ ID NO: 960 - RNA, 129 nt, synthetic construct
  source 1..129: mol_type = other RNA
cctaaagttaattatgtaccgttttagagctagaaatagcaagttaaaataaggctagtccgttatcaacttgaaaaagtggcaccgagtcggtgcgatgccagttccttggaccaggcacataattaa

SEQ ID NO: 961 - RNA, 130 nt, synthetic construct
  source 1..130: mol_type = other RNA
cctaaagttaattatgtaccgttttagagctagaaatagcaagttaaaataaggctagtccgttatcaacttgaaaaagtggcaccgagtcggtgcgatgccagttccttggaccaggcacataattaac

SEQ ID NO: 962 - RNA, 131 nt, synthetic construct
  source 1..131: mol_type = other RNA
cctaaagttaattatgtaccgttttagagctagaaatagcaagttaaaataaggctagtccgttatcaacttgaaaaagtggcaccgagtcggtgcgatgccagttccttggaccaggcacataattaact

SEQ ID NO: 963 - RNA, 132 nt, synthetic construct
  source 1..132: mol_type = other RNA
cctaaagttaattatgtaccgttttagagctagaaatagcaagttaaaataaggctagtccgttatcaacttgaaaaagtggcaccgagtcggtgcgatgccagttccttggaccaggcacataattaactt

SEQ ID NO: 964 - RNA, 133 nt, synthetic construct
  source 1..133: mol_type = other RNA
cctaaagttaattatgtaccgttttagagctagaaatagcaagttaaaataaggctagtccgttatcaacttgaaaaagtggcaccgagtcggtgcgatgccagttccttggaccaggcacataattaacttt

SEQ ID NO: 965 - RNA, 134 nt, synthetic construct
  source 1..134: mol_type = other RNA
cctaaagttaattatgtaccgttttagagctagaaatagcaagttaaaataaggctagtccgttatcaacttgaaaaagtggcaccgagtcggtgcgatgccagttccttggaccaggcacataattaacttta

SEQ ID NO: 966 - RNA, 130 nt, synthetic construct
  source 1..130: mol_type = other RNA
cctaaagttaattatgtaccgttttagagctagaaatagcaagttaaaataaggctagtccgttatcaacttgaaaaagtggcaccgagtcggtgcggatgccagttccttggaccaggcacataattaa

SEQ ID NO: 967 - RNA, 131 nt, synthetic construct
  source 1..131: mol_type = other RNA
cctaaagttaattatgtaccgttttagagctagaaatagcaagttaaaataaggctagtccgttatcaacttgaaaaagtggcaccgagtcggtgcggatgccagttccttggaccaggcacataattaac

SEQ ID NO: 968 - RNA, 132 nt, synthetic construct
  source 1..132: mol_type = other RNA
cctaaagttaattatgtaccgttttagagctagaaatagcaagttaaaataaggctagtccgttatcaacttgaaaaagtggcaccgagtcggtgcggatgccagttccttggaccaggcacataattaact

SEQ ID NO: 969 - RNA, 133 nt, synthetic construct
  source 1..133: mol_type = other RNA
cctaaagttaattatgtaccgttttagagctagaaatagcaagttaaaataaggctagtccgttatcaacttgaaaaagtggcaccgagtcggtgcggatgccagttccttggaccaggcacataattaactt

SEQ ID NO: 970 - RNA, 134 nt, synthetic construct
  source 1..134: mol_type = other RNA
cctaaagttaattatgtaccgttttagagctagaaatagcaagttaaaataaggctagtccgttatcaacttgaaaaagtggcaccgagtcggtgcggatgccagttccttggaccaggcacataattaacttt

SEQ ID NO: 971 - RNA, 135 nt, synthetic construct
  source 1..135: mol_type = other RNA
cctaaagttaattatgtaccgttttagagctagaaatagcaagttaaaataaggctagtccgttatcaacttgaaaaagtggcaccgagtcggtgcggatgccagttccttggaccaggcacataattaacttta

SEQ ID NO: 972 - RNA, 131 nt, synthetic construct
  source 1..131: mol_type = other RNA
cctaaagttaattatgtaccgttttagagctagaaatagcaagttaaaataaggctagtccgttatcaacttgaaaaagtggcaccgagtcggtgcgggatgccagttccttggaccaggcacataattaa

SEQ ID NO: 973 - RNA, 132 nt, synthetic construct
  source 1..132: mol_type = other RNA
cctaaagttaattatgtaccgttttagagctagaaatagcaagttaaaataaggctagtccgttatcaacttgaaaaagtggcaccgagtcggtgcgggatgccagttccttggaccaggcacataattaac

SEQ ID NO: 974 - RNA, 133 nt, synthetic construct
  source 1..133: mol_type = other RNA
cctaaagttaattatgtaccgttttagagctagaaatagcaagttaaaataaggctagtccgttatcaacttgaaaaagtggcaccgagtcggtgcgggatgccagttccttggaccaggcacataattaact

SEQ ID NO: 975 - RNA, 134 nt, synthetic construct
  source 1..134: mol_type = other RNA
cctaaagttaattatgtaccgttttagagctagaaatagcaagttaaaataaggctagtccgttatcaacttgaaaaagtggcaccgagtcggtgcgggatgccagttccttggaccaggcacataattaactt

SEQ ID NO: 976 - RNA, 135 nt, synthetic construct
  source 1..135: mol_type = other RNA
cctaaagttaattatgtaccgttttagagctagaaatagcaagttaaaataaggctagtccgttatcaacttgaaaaagtggcaccgagtcggtgcgggatgccagttccttggaccaggcacataattaacttt

SEQ ID NO: 977 - RNA, 136 nt, synthetic construct
  source 1..136: mol_type = other RNA
cctaaagttaattatgtaccgttttagagctagaaatagcaagttaaaataaggctagtccgttatcaacttgaaaaagtggcaccgagtcggtgcgggatgccagttccttggaccaggcacataattaacttta

SEQ ID NO: 978 - RNA, 132 nt, synthetic construct
  source 1..132: mol_type = other RNA
cctaaagttaattatgtaccgttttagagctagaaatagcaagttaaaataaggctagtccgttatcaacttgaaaaagtggcaccgagtcggtgcggggatgccagttccttggaccaggcacataattaa

SEQ ID NO: 979 - RNA, 133 nt, synthetic construct
  source 1..133: mol_type = other RNA
cctaaagttaattatgtaccgttttagagctagaaatagcaagttaaaataaggctagtccgttatcaacttgaaaaagtggcaccgagtcggtgcggggatgccagttccttggaccaggcacataattaac

SEQ ID NO: 980 - RNA, 134 nt, synthetic construct
  source 1..134: mol_type = other RNA
cctaaagttaattatgtaccgttttagagctagaaatagcaagttaaaataaggctagtccgttatcaacttgaaaaagtggcaccgagtcggtgcggggatgccagttccttggaccaggcacataattaact

SEQ ID NO: 981 - RNA, 135 nt, synthetic construct
  source 1..135: mol_type = other RNA
cctaaagttaattatgtaccgttttagagctagaaatagcaagttaaaataaggctagtccgttatcaacttgaaaaagtggcaccgagtcggtgcggggatgccagttccttggaccaggcacataattaactt

SEQ ID NO: 982 - RNA, 136 nt, synthetic construct
  source 1..136: mol_type = other RNA
cctaaagttaattatgtaccgttttagagctagaaatagcaagttaaaataaggctagtccgttatcaacttgaaaaagtggcaccgagtcggtgcggggatgccagttccttggaccaggcacataattaacttt

SEQ ID NO: 983 - RNA, 137 nt, synthetic construct
  source 1..137: mol_type = other RNA
cctaaagttaattatgtaccgttttagagctagaaatagcaagttaaaataaggctagtccgttatcaacttgaaaaagtggcaccgagtcggtgcggggatgccagttccttggaccaggcacataattaacttta

SEQ ID NO: 984 - RNA, 133 nt, synthetic construct
  source 1..133: mol_type = other RNA
cctaaagttaattatgtaccgttttagagctagaaatagcaagttaaaataaggctagtccgttatcaacttgaaaaagtggcaccgagtcggtgcaggggatgccagttccttggaccaggcacataattaa

SEQ ID NO: 985 - RNA, 134 nt, synthetic construct
  source 1..134: mol_type = other RNA
cctaaagttaattatgtaccgttttagagctagaaatagcaagttaaaataaggctagtccgttatcaacttgaaaaagtggcaccgagtcggtgcaggggatgccagttccttggaccaggcacataattaac

SEQ ID NO: 986 - RNA, 135 nt, synthetic construct
  source 1..135: mol_type = other RNA
cctaaagttaattatgtaccgttttagagctagaaatagcaagttaaaataaggctagtccgttatcaacttgaaaaagtggcaccgagtcggtgcaggggatgccagttccttggaccaggcacataattaact

SEQ ID NO: 987 - RNA, 136 nt, synthetic construct
  source 1..136: mol_type = other RNA
cctaaagttaattatgtaccgttttagagctagaaatagcaagttaaaataaggctagtccgttatcaacttgaaaaagtggcaccgagtcggtgcaggggatgccagttccttggaccaggcacataattaactt

SEQ ID NO: 988 - RNA, 137 nt, synthetic construct
  source 1..137: mol_type = other RNA
cctaaagttaattatgtaccgttttagagctagaaatagcaagttaaaataaggctagtccgttatcaacttgaaaaagtggcaccgagtcggtgcaggggatgccagttccttggaccaggcacataattaacttt

SEQ ID NO: 989 - RNA, 138 nt, synthetic construct
  source 1..138: mol_type = other RNA
cctaaagttaattatgtaccgttttagagctagaaatagcaagttaaaataaggctagtccgttatcaacttgaaaaagtggcaccgagtcggtgcaggggatgccagttccttggaccaggcacataattaacttta

SEQ ID NO: 990 - RNA, 134 nt, synthetic construct
  source 1..134: mol_type = other RNA
cctaaagttaattatgtaccgttttagagctagaaatagcaagttaaaataaggctagtccgttatcaacttgaaaaagtggcaccgagtcggtgctaggggatgccagttccttggaccaggcacataattaa

SEQ ID NO: 991 - RNA, 135 nt, synthetic construct
  source 1..135: mol_type = other RNA
cctaaagttaattatgtaccgttttagagctagaaatagcaagttaaaataaggctagtccgttatcaacttgaaaaagtggcaccgagtcggtgctaggggatgccagttccttggaccaggcacataattaac

SEQ ID NO: 992 - RNA, 136 nt, synthetic construct
  source 1..136: mol_type = other RNA
cctaaagttaattatgtaccgttttagagctagaaatagcaagttaaaataaggctagtccgttatcaacttgaaaaagtggcaccgagtcggtgctaggggatgccagttccttggaccaggcacataattaact

SEQ ID NO: 993 - RNA, 137 nt, synthetic construct
  source 1..137: mol_type = other RNA
cctaaagttaattatgtaccgttttagagctagaaatagcaagttaaaataaggctagtccgttatcaacttgaaaaagtggcaccgagtcggtgctaggggatgccagttccttggaccaggcacataattaactt

SEQ ID NO: 994 - RNA, 138 nt, synthetic construct
  source 1..138: mol_type = other RNA
cctaaagttaattatgtaccgttttagagctagaaatagcaagttaaaataaggctagtccgttatcaacttgaaaaagtggcaccgagtcggtgctaggggatgccagttccttggaccaggcacataattaacttt

SEQ ID NO: 995 - RNA, 139 nt, synthetic construct
  source 1..139: mol_type = other RNA
cctaaagttaattatgtaccgttttagagctagaaatagcaagttaaaataaggctagtccgttatcaacttgaaaaagtggcaccgagtcggtgctaggggatgccagttccttggaccaggcacataattaacttta

SEQ ID NO: 996 - RNA, 135 nt, synthetic construct
  source 1..135: mol_type = other RNA
cctaaagttaattatgtaccgttttagagctagaaatagcaagttaaaataaggctagtccgttatcaacttgaaaaagtggcaccgagtcggtgcctaggggatgccagttccttggaccaggcacataattaa

SEQ ID NO: 997 - RNA, 136 nt, synthetic construct
  source 1..136: mol_type = other RNA
cctaaagttaattatgtaccgttttagagctagaaatagcaagttaaaataaggctagtccgttatcaacttgaaaaagtggcaccgagtcggtgcctaggggatgccagttccttggaccaggcacataattaac

SEQ ID NO: 998 - RNA, 137 nt, synthetic construct
  source 1..137: mol_type = other RNA
cctaaagttaattatgtaccgttttagagctagaaatagcaagttaaaataaggctagtccgttatcaacttgaaaaagtggcaccgagtcggtgcctaggggatgccagttccttggaccaggcacataattaact

SEQ ID NO: 999 - RNA, 138 nt, synthetic construct
  source 1..138: mol_type = other RNA
cctaaagttaattatgtaccgttttagagctagaaatagcaagttaaaataaggctagtccgttatcaacttgaaaaagtggcaccgagtcggtgcctaggggatgccagttccttggaccaggcacataattaactt

SEQ ID NO: 1000 - RNA, 139 nt, synthetic construct
  source 1..139: mol_type = other RNA
cctaaagttaattatgtaccgttttagagctagaaatagcaagttaaaataaggctagtccgttatcaacttgaaaaagtggcaccgagtcggtgcctaggggatgccagttccttggaccaggcacataattaacttt

SEQ ID NO: 1001 - RNA, 140 nt, synthetic construct
  source 1..140: mol_type = other RNA
cctaaagttaattatgtaccgttttagagctagaaatagcaagttaaaataaggctagtccgttatcaacttgaaaaagtggcaccgagtcggtgcctaggggatgccagttccttggaccaggcacataattaacttta

SEQ ID NO: 1002 - RNA, 136 nt, synthetic construct
  source 1..136: mol_type = other RNA
cctaaagttaattatgtaccgttttagagctagaaatagcaagttaaaataaggctagtccgttatcaacttgaaaaagtggcaccgagtcggtgcgctaggggatgccagttccttggaccaggcacataattaa

SEQ ID NO: 1003 - RNA, 137 nt, synthetic construct
  source 1..137: mol_type = other RNA
cctaaagttaattatgtaccgttttagagctagaaatagcaagttaaaataaggctagtccgttatcaacttgaaaaagtggcaccgagtcggtgcgctaggggatgccagttccttggaccaggcacataattaac

SEQ ID NO: 1004 - RNA, 138 nt, synthetic construct
  source 1..138: mol_type = other RNA
cctaaagttaattatgtaccgttttagagctagaaatagcaagttaaaataaggctagtccgttatcaacttgaaaaagtggcaccgagtcggtgcgctaggggatgccagttccttggaccaggcacataattaact

SEQ ID NO: 1005 - RNA, 139 nt, synthetic construct
  source 1..139: mol_type = other RNA
cctaaagttaattatgtaccgttttagagctagaaatagcaagttaaaataaggctagtccgttatcaacttgaaaaagtggcaccgagtcggtgcgctaggggatgccagttccttggaccaggcacataattaactt

SEQ ID NO: 1006 - RNA, 140 nt, synthetic construct
  source 1..140: mol_type = other RNA
cctaaagttaattatgtaccgttttagagctagaaatagcaagttaaaataaggctagtccgttatcaacttgaaaaagtggcaccgagtcggtgcgctaggggatgccagttccttggaccaggcacataattaacttt

SEQ ID NO: 1007 - RNA, 141 nt, synthetic construct
  source 1..141: mol_type = other RNA
cctaaagttaattatgtaccgttttagagctagaaatagcaagttaaaataaggctagtccgttatcaacttgaaaaagtggcaccgagtcggtgcgctaggggatgccagttccttggaccaggcacataattaacttta

SEQ ID NO: 1008 - RNA, 116 nt, synthetic construct
  source 1..116: mol_type = other RNA
ggatgccagttccttggaccgttttagagctagaaatagcaagttaaaataaggctagtccgttatcaacttgaaaaagtggcaccgagtcggtgctgtgcctggtccaaggaact

SEQ ID NO: 1009 - RNA, 117 nt, synthetic construct
  source 1..117: mol_type = other RNA
ggatgccagttccttggaccgttttagagctagaaatagcaagttaaaataaggctagtccgttatcaacttgaaaaagtggcaccgagtcggtgctgtgcctggtccaaggaactg

SEQ ID NO: 1010 - RNA, 118 nt, synthetic construct
  source 1..118: mol_type = other RNA
ggatgccagttccttggaccgttttagagctagaaatagcaagttaaaataaggctagtccgttatcaacttgaaaaagtggcaccgagtcggtgctgtgcctggtccaaggaactgg

SEQ ID NO: 1011 - RNA, 119 nt, synthetic construct
  source 1..119: mol_type = other RNA
ggatgccagttccttggaccgttttagagctagaaatagcaagttaaaataaggctagtccgttatcaacttgaaaaagtggcaccgagtcggtgctgtgcctggtccaaggaactggc

SEQ ID NO: 1012 - RNA, 120 nt, synthetic construct
  source 1..120: mol_type = other RNA
ggatgccagttccttggaccgttttagagctagaaatagcaagttaaaataaggctagtccgttatcaacttgaaaaagtggcaccgagtcggtgctgtgcctggtccaaggaactggca

SEQ ID NO: 1013 - RNA, 121 nt, synthetic construct
  source 1..121: mol_type = other RNA
ggatgccagttccttggaccgttttagagctagaaatagcaagttaaaataaggctagtccgttatcaacttgaaaaagtggcaccgagtcggtgctgtgcctggtccaaggaactggcat

SEQ ID NO: 1014 - RNA, 117 nt, synthetic construct
  source 1..117: mol_type = other RNA
ggatgccagttccttggaccgttttagagctagaaatagcaagttaaaataaggctagtccgttatcaacttgaaaaagtggcaccgagtcggtgcatgtgcctggtccaaggaact

SEQ ID NO: 1015 - RNA, 118 nt, synthetic construct
  source 1..118: mol_type = other RNA
ggatgccagttccttggaccgttttagagctagaaatagcaagttaaaataaggctagtccgttatcaacttgaaaaagtggcaccgagtcggtgcatgtgcctggtccaaggaactg

SEQ ID NO: 1016 - RNA, 119 nt, synthetic construct
  source 1..119: mol_type = other RNA
ggatgccagttccttggaccgttttagagctagaaatagcaagttaaaataaggctagtccgttatcaacttgaaaaagtggcaccgagtcggtgcatgtgcctggtccaaggaactgg

SEQ ID NO: 1017 - RNA, 120 nt, synthetic construct
  source 1..120: mol_type = other RNA
ggatgccagttccttggaccgttttagagctagaaatagcaagttaaaataaggctagtccgttatcaacttgaaaaagtggcaccgagtcggtgcatgtgcctggtccaaggaactggc

SEQ ID NO: 1018 - RNA, 121 nt, synthetic construct
  source 1..121: mol_type = other RNA
ggatgccagttccttggaccgttttagagctagaaatagcaagttaaaataaggctagtccgttatcaacttgaaaaagtggcaccgagtcggtgcatgtgcctggtccaaggaactggca

SEQ ID NO: 1019 - RNA, 122 nt, synthetic construct
  source 1..122: mol_type = other RNA
ggatgccagttccttggaccgttttagagctagaaatagcaagttaaaataaggctagtccgttatcaacttgaaaaagtggcaccgagtcggtgcatgtgcctggtccaaggaactggcat

SEQ ID NO: 1020 - RNA, 118 nt, synthetic construct
  source 1..118: mol_type = other RNA
ggatgccagttccttggaccgttttagagctagaaatagcaagttaaaataaggctagtccgttatcaacttgaaaaagtggcaccgagtcggtgctatgtgcctggtccaaggaact

SEQ ID NO: 1021 - RNA, 119 nt, synthetic construct
  source 1..119: mol_type = other RNA
ggatgccagttccttggaccgttttagagctagaaatagcaagttaaaataaggctagtccgttatcaacttgaaaaagtggcaccgagtcggtgctatgtgcctggtccaaggaactg

SEQ ID NO: 1022 - RNA, 120 nt, synthetic construct
  source 1..120: mol_type = other RNA
ggatgccagttccttggaccgttttagagctagaaatagcaagttaaaataaggctagtccgttatcaacttgaaaaagtggcaccgagtcggtgctatgtgcctggtccaaggaactgg

SEQ ID NO: 1023 - RNA, 121 nt, synthetic construct
  source 1..121: mol_type = other RNA
ggatgccagttccttggaccgttttagagctagaaatagcaagttaaaataaggctagtccgttatcaacttgaaaaagtggcaccgagtcggtgctatgtgcctggtccaaggaactggc

SEQ ID NO: 1024 - RNA, 122 nt, synthetic construct
  source 1..122: mol_type = other RNA
ggatgccagttccttggaccgttttagagctagaaatagcaagttaaaataaggctagtccgttatcaacttgaaaaagtggcaccgagtcggtgctatgtgcctggtccaaggaactggca

SEQ ID NO: 1025 - RNA, 123 nt, synthetic construct
  source 1..123: mol_type = other RNA
ggatgccagttccttggaccgttttagagctagaaatagcaagttaaaataaggctagtccgttatcaacttgaaaaagtggcaccgagtcggtgctatgtgcctggtccaaggaactggcat

SEQ ID NO: 1026 - RNA, 119 nt, synthetic construct
  source 1..119: mol_type = other RNA
ggatgccagttccttggaccgttttagagctagaaatagcaagttaaaataaggctagtccgttatcaacttgaaaaagtggcaccgagtcggtgcttatgtgcctggtccaaggaact

SEQ ID NO: 1027 - RNA, 120 nt, synthetic construct
  source 1..120: mol_type = other RNA
ggatgccagttccttggaccgttttagagctagaaatagcaagttaaaataaggctagtccgttatcaacttgaaaaagtggcaccgagtcggtgcttatgtgcctggtccaaggaactg

SEQ ID NO: 1028 - RNA, 121 nt, synthetic construct
  source 1..121: mol_type = other RNA
ggatgccagttccttggaccgttttagagctagaaatagcaagttaaaataaggctagtccgttatcaacttgaaaaagtggcaccgagtcggtgcttatgtgcctggtccaaggaactgg

SEQ ID NO: 1029 - RNA, 122 nt, synthetic construct
  source 1..122: mol_type = other RNA
ggatgccagttccttggaccgttttagagctagaaatagcaagttaaaataaggctagtccgttatcaacttgaaaaagtggcaccgagtcggtgcttatgtgcctggtccaaggaactggc

SEQ ID NO: 1030 - RNA, 123 nt, synthetic construct
  source 1..123: mol_type = other RNA
ggatgccagttccttggaccgttttagagctagaaatagcaagttaaaataaggctagtccgttatcaacttgaaaaagtggcaccgagtcggtgcttatgtgcctggtccaaggaactggca

SEQ ID NO: 1031 - RNA, 124 nt, synthetic construct
  source 1..124: mol_type = other RNA
ggatgccagttccttggaccgttttagagctagaaatagcaagttaaaataaggctagtccgttatcaacttgaaaaagtggcaccgagtcggtgcttatgtgcctggtccaaggaactggcat

SEQ ID NO: 1032 - RNA, 120 nt, synthetic construct
  source 1..120: mol_type = other RNA
ggatgccagttccttggaccgttttagagctagaaatagcaagttaaaataaggctagtccgttatcaacttgaaaaagtggcaccgagtcggtgcattatgtgcctggtccaaggaact

SEQ ID NO: 1033 - RNA, 121 nt, synthetic construct
  source 1..121: mol_type = other RNA
ggatgccagttccttggaccgttttagagctagaaatagcaagttaaaataaggctagtccgttatcaacttgaaaaagtggcaccgagtcggtgcattatgtgcctggtccaaggaactg

SEQ ID NO: 1034 - RNA, 122 nt, synthetic construct
  source 1..122: mol_type = other RNA
ggatgccagttccttggaccgttttagagctagaaatagcaagttaaaataaggctagtccgttatcaacttgaaaaagtggcaccgagtcggtgcattatgtgcctggtccaaggaactgg

SEQ ID NO: 1035 - RNA, 123 nt, synthetic construct
  source 1..123: mol_type = other RNA
ggatgccagttccttggaccgttttagagctagaaatagcaagttaaaataaggctagtccgttatcaacttgaaaaagtggcaccgagtcggtgcattatgtgcctggtccaaggaactggc

SEQ ID NO: 1036 - RNA, 124 nt, synthetic construct
  source 1..124: mol_type = other RNA
ggatgccagttccttggaccgttttagagctagaaatagcaagttaaaataaggctagtccgttatcaacttgaaaaagtggcaccgagtcggtgcattatgtgcctggtccaaggaactggca

SEQ ID NO: 1037 - RNA, 125 nt, synthetic construct
  source 1..125: mol_type = other RNA
ggatgccagttccttggaccgttttagagctagaaatagcaagttaaaataaggctagtccgttatcaacttgaaaaagtggcaccgagtcggtgcattatgtgcctggtccaaggaactggcat

SEQ ID NO: 1038 - RNA, 121 nt, synthetic construct
  source 1..121: mol_type = other RNA
ggatgccagttccttggaccgttttagagctagaaatagcaagttaaaataaggctagtccgttatcaacttgaaaaagtggcaccgagtcggtgcaattatgtgcctggtccaaggaact

SEQ ID NO: 1039 - RNA, 122 nt, synthetic construct
  source 1..122: mol_type = other RNA
ggatgccagttccttggaccgttttagagctagaaatagcaagttaaaataaggctagtccgttatcaacttgaaaaagtggcaccgagtcggtgcaattatgtgcctggtccaaggaactg

SEQ ID NO: 1040 - RNA, 123 nt, synthetic construct
  source 1..123: mol_type = other RNA
ggatgccagttccttggaccgttttagagctagaaatagcaagttaaaataaggctagtccgttatcaacttgaaaaagtggcaccgagtcggtgcaattatgtgcctggtccaaggaactgg

SEQ ID NO: 1041 - RNA, 124 nt, synthetic construct
  source 1..124: mol_type = other RNA
ggatgccagttccttggaccgttttagagctagaaatagcaagttaaaataaggctagtccgttatcaacttgaaaaagtggcaccgagtcggtgcaattatgtgcctggtccaaggaactggc

SEQ ID NO: 1042 - RNA, 125 nt, synthetic construct
  source 1..125: mol_type = other RNA
ggatgccagttccttggaccgttttagagctagaaatagcaagttaaaataaggctagtccgttatcaacttgaaaaagtggcaccgagtcggtgcaattatgtgcctggtccaaggaactggca

SEQ ID NO: 1043 - RNA, 126 nt, synthetic construct
  source 1..126: mol_type = other RNA
ggatgccagttccttggaccgttttagagctagaaatagcaagttaaaataaggctagtccgttatcaacttgaaaaagtggcaccgagtcggtgcaattatgtgcctggtccaaggaactggcat

SEQ ID NO: 1044 - RNA, 122 nt, synthetic construct
  source 1..122: mol_type = other RNA
ggatgccagttccttggaccgttttagagctagaaatagcaagttaaaataaggctagtccgttatcaacttgaaaaagtggcaccgagtcggtgctaattatgtgcctggtccaaggaact

SEQ ID NO: 1045 - RNA, 123 nt, synthetic construct
  source 1..123: mol_type = other RNA
ggatgccagttccttggaccgttttagagctagaaatagcaagttaaaataaggctagtccgttatcaacttgaaaaagtggcaccgagtcggtgctaattatgtgcctggtccaaggaactg

SEQ ID NO: 1046 - RNA, 124 nt, synthetic construct
  source 1..124: mol_type = other RNA
ggatgccagttccttggaccgttttagagctagaaatagcaagttaaaataaggctagtccgttatcaacttgaaaaagtggcaccgagtcggtgctaattatgtgcctggtccaaggaactgg

SEQ ID NO: 1047 - RNA, 125 nt, synthetic construct
  source 1..125: mol_type = other RNA
ggatgccagttccttggaccgttttagagctagaaatagcaagttaaaataaggctagtccgttatcaacttgaaaaagtggcaccgagtcggtgctaattatgtgcctggtccaaggaactggc

SEQ ID NO: 1048 - RNA, 126 nt, synthetic construct
  source 1..126: mol_type = other RNA
ggatgccagttccttggaccgttttagagctagaaatagcaagttaaaataaggctagtccgttatcaacttgaaaaagtggcaccgagtcggtgctaattatgtgcctggtccaaggaactggca

SEQ ID NO: 1049 - RNA, 127 nt, synthetic construct
  source 1..127: mol_type = other RNA
ggatgccagttccttggaccgttttagagctagaaatagcaagttaaaataaggctagtccgttatcaacttgaaaaagtggcaccgagtcggtgctaattatgtgcctggtccaaggaactggcat

SEQ ID NO: 1050 - RNA, 123 nt, synthetic construct
  source 1..123: mol_type = other RNA
ggatgccagttccttggaccgttttagagctagaaatagcaagttaaaataaggctagtccgttatcaacttgaaaaagtggcaccgagtcggtgcttaattatgtgcctggtccaaggaact

SEQ ID NO: 1051 - RNA, 124 nt, synthetic construct
  source 1..124: mol_type = other RNA
ggatgccagttccttggaccgttttagagctagaaatagcaagttaaaataaggctagtccgttatcaacttgaaaaagtggcaccgagtcggtgcttaattatgtgcctggtccaaggaactg

SEQ ID NO: 1052 - RNA, 125 nt, synthetic construct
  source 1..125: mol_type = other RNA
ggatgccagttccttggaccgttttagagctagaaatagcaagttaaaataaggctagtccgttatcaacttgaaaaagtggcaccgagtcggtgcttaattatgtgcctggtccaaggaactgg

SEQ ID NO: 1053 - RNA, 126 nt, synthetic construct
  source 1..126: mol_type = other RNA
ggatgccagttccttggaccgttttagagctagaaatagcaagttaaaataaggctagtccgttatcaacttgaaaaagtggcaccgagtcggtgcttaattatgtgcctggtccaaggaactggc

SEQ ID NO: 1054 - RNA, 127 nt, synthetic construct
  source 1..127: mol_type = other RNA
ggatgccagttccttggaccgttttagagctagaaatagcaagttaaaataaggctagtccgttatcaacttgaaaaagtggcaccgagtcggtgcttaattatgtgcctggtccaaggaactggca

SEQ ID NO: 1055 - RNA, 128 nt, synthetic construct
  source 1..128: mol_type = other RNA
ggatgccagttccttggaccgttttagagctagaaatagcaagttaaaataaggctagtccgttatcaacttgaaaaagtggcaccgagtcggtgcttaattatgtgcctggtccaaggaactggcat

SEQ ID NO: 1056 - RNA, 124 nt, synthetic construct
  source 1..124: mol_type = other RNA
ggatgccagttccttggaccgttttagagctagaaatagcaagttaaaataaggctagtccgttatcaacttgaaaaagtggcaccgagtcggtgcgttaattatgtgcctggtccaaggaact

SEQ ID NO: 1057 - RNA, 125 nt, synthetic construct
  source 1..125: mol_type = other RNA
ggatgccagttccttggaccgttttagagctagaaatagcaagttaaaataaggctagtccgttatcaacttgaaaaagtggcaccgagtcggtgcgttaattatgtgcctggtccaaggaactg

SEQ ID NO: 1058 - RNA, 126 nt, synthetic construct
  source 1..126: mol_type = other RNA
ggatgccagttccttggaccgttttagagctagaaatagcaagttaaaataaggctagtccgttatcaacttgaaaaagtggcaccgagtcggtgcgttaattatgtgcctggtccaaggaactgg

SEQ ID NO: 1059 - RNA, 127 nt, synthetic construct
  source 1..127: mol_type = other RNA
ggatgccagttccttggaccgttttagagctagaaatagcaagttaaaataaggctagtccgttatcaacttgaaaaagtggcaccgagtcggtgcgttaattatgtgcctggtccaaggaactggc

SEQ ID NO: 1060 - RNA, 128 nt, synthetic construct
  source 1..128: mol_type = other RNA
ggatgccagttccttggaccgttttagagctagaaatagcaagttaaaataaggctagtccgttatcaacttgaaaaagtggcaccgagtcggtgcgttaattatgtgcctggtccaaggaactggca

SEQ ID NO: 1061 - RNA, 129 nt, synthetic construct
  source 1..129: mol_type = other RNA
ggatgccagttccttggaccgttttagagctagaaatagcaagttaaaataaggctagtccgttatcaacttgaaaaagtggcaccgagtcggtgcgttaattatgtgcctggtccaaggaactggcat

SEQ ID NO: 1062 - RNA, 125 nt, synthetic construct
  source 1..125: mol_type = other RNA
ggatgccagttccttggaccgttttagagctagaaatagcaagttaaaataaggctagtccgttatcaacttgaaaaagtggcaccgagtcggtgcagttaattatgtgcctggtccaaggaact

SEQ ID NO: 1063 - RNA, 126 nt, synthetic construct
  source 1..126: mol_type = other RNA
ggatgccagttccttggaccgttttagagctagaaatagcaagttaaaataaggctagtccgttatcaacttgaaaaagtggcaccgagtcggtgcagttaattatgtgcctggtccaaggaactg

SEQ ID NO: 1064 - RNA, 127 nt, synthetic construct
  source 1..127: mol_type = other RNA
ggatgccagttccttggaccgttttagagctagaaatagcaagttaaaataaggctagtccgttatcaacttgaaaaagtggcaccgagtcggtgcagttaattatgtgcctggtccaaggaactgg

SEQ ID NO: 1065 - RNA, 128 nt, synthetic construct
  source 1..128: mol_type = other RNA
ggatgccagttccttggaccgttttagagctagaaatagcaagttaaaataaggctagtccgttatcaacttgaaaaagtggcaccgagtcggtgcagttaattatgtgcctggtccaaggaactggc

SEQ ID NO: 1066 - RNA, 129 nt, synthetic construct
  source 1..129: mol_type = other RNA
ggatgccagttccttggaccgttttagagctagaaatagcaagttaaaataaggctagtccgttatcaacttgaaaaagtggcaccgagtcggtgcagttaattatgtgcctggtccaaggaactggca

SEQ ID NO: 1067 - RNA, 130 nt, synthetic construct
  source 1..130: mol_type = other RNA
ggatgccagttccttggaccgttttagagctagaaatagcaagttaaaataaggctagtccgttatcaacttgaaaaagtggcaccgagtcggtgcagttaattatgtgcctggtccaaggaactggcat

SEQ ID NO: 1068 - RNA, 126 nt, synthetic construct
  source 1..126: mol_type = other RNA
ggatgccagttccttggaccgttttagagctagaaatagcaagttaaaataaggctagtccgttatcaacttgaaaaagtggcaccgagtcggtgcaagttaattatgtgcctggtccaaggaact

SEQ ID NO: 1069 - RNA, 127 nt, synthetic construct
  source 1..127: mol_type = other RNA
ggatgccagttccttggaccgttttagagctagaaatagcaagttaaaataaggctagtccgttatcaacttgaaaaagtggcaccgagtcggtgcaagttaattatgtgcctggtccaaggaactg

SEQ ID NO: 1070 - RNA, 128 nt, synthetic construct
  source 1..128: mol_type = other RNA
ggatgccagttccttggaccgttttagagctagaaatagcaagttaaaataaggctagtccgttatcaacttgaaaaagtggcaccgagtcggtgcaagttaattatgtgcctggtccaaggaactgg

SEQ ID NO: 1071 - RNA, 129 nt, synthetic construct
  source 1..129: mol_type = other RNA
ggatgccagttccttggaccgttttagagctagaaatagcaagttaaaataaggctagtccgttatcaacttgaaaaagtggcaccgagtcggtgcaagttaattatgtgcctggtccaaggaactggc

SEQ ID NO: 1072 - RNA, 130 nt, synthetic construct
  source 1..130: mol_type = other RNA
ggatgccagttccttggaccgttttagagctagaaatagcaagttaaaataaggctagtccgttatcaacttgaaaaagtggcaccgagtcggtgcaagttaattatgtgcctggtccaaggaactggca

SEQ ID NO: 1073 - RNA, 131 nt, synthetic construct
  source 1..131: mol_type = other RNA
ggatgccagttccttggaccgttttagagctagaaatagcaagttaaaataaggctagtccgttatcaacttgaaaaagtggcaccgagtcggtgcaagttaattatgtgcctggtccaaggaactggcat

SEQ ID NO: 1074 - RNA, 127 nt, synthetic construct
  source 1..127: mol_type = other RNA
ggatgccagttccttggaccgttttagagctagaaatagcaagttaaaataaggctagtccgttatcaacttgaaaaagtggcaccgagtcggtgcaaagttaattatgtgcctggtccaaggaact

SEQ ID NO: 1075 - RNA, 128 nt, synthetic construct
  source 1..128: mol_type = other RNA
ggatgccagttccttggaccgttttagagctagaaatagcaagttaaaataaggctagtccgttatcaacttgaaaaagtggcaccgagtcggtgcaaagttaattatgtgcctggtccaaggaactg

SEQ ID NO: 1076 - RNA, 129 nt, synthetic construct
  source 1..129: mol_type = other RNA
ggatgccagttccttggaccgttttagagctagaaatagcaagttaaaataaggctagtccgttatcaacttgaaaaagtggcaccgagtcggtgcaaagttaattatgtgcctggtccaaggaactgg

SEQ ID NO: 1077 - RNA, 130 nt, synthetic construct
  source 1..130: mol_type = other RNA
ggatgccagttccttggaccgttttagagctagaaatagcaagttaaaataaggctagtccgttatcaacttgaaaaagtggcaccgagtcggtgcaaagttaattatgtgcctggtccaaggaactggc

SEQ ID NO: 1078 - RNA, 131 nt, synthetic construct
  source 1..131: mol_type = other RNA
ggatgccagttccttggaccgttttagagctagaaatagcaagttaaaataaggctagtccgttatcaacttgaaaaagtggcaccgagtcggtgcaaagttaattatgtgcctggtccaaggaactggca

SEQ ID NO: 1079 - RNA, 132 nt, synthetic construct
  source 1..132: mol_type = other RNA
ggatgccagttccttggaccgttttagagctagaaatagcaagttaaaataaggctagtccgttatcaacttgaaaaagtggcaccgagtcggtgcaaagttaattatgtgcctggtccaaggaactggcat

SEQ ID NO: 1080 - RNA, 128 nt, synthetic construct
  source 1..128: mol_type = other RNA
ggatgccagttccttggaccgttttagagctagaaatagcaagttaaaataaggctagtccgttatcaacttgaaaaagtggcaccgagtcggtgctaaagttaattatgtgcctggtccaaggaact

SEQ ID NO: 1081 - RNA, 129 nt, synthetic construct
  source 1..129: mol_type = other RNA
ggatgccagttccttggaccgttttagagctagaaatagcaagttaaaataaggctagtccgttatcaacttgaaaaagtggcaccgagtcggtgctaaagttaattatgtgcctggtccaaggaactg

SEQ ID NO: 1082 - RNA, 130 nt, synthetic construct
  source 1..130: mol_type = other RNA
ggatgccagttccttggaccgttttagagctagaaatagcaagttaaaataaggctagtccgttatcaacttgaaaaagtggcaccgagtcggtgctaaagttaattatgtgcctggtccaaggaactgg

SEQ ID NO: 1083 - RNA, 131 nt, synthetic construct
  source 1..131: mol_type = other RNA
ggatgccagttccttggaccgttttagagctagaaatagcaagttaaaataaggctagtccgttatcaacttgaaaaagtggcaccgagtcggtgctaaagttaattatgtgcctggtccaaggaactggc

SEQ ID NO: 1084 - RNA, 132 nt, synthetic construct
  source 1..132: mol_type = other RNA
ggatgccagttccttggaccgttttagagctagaaatagcaagttaaaataaggctagtccgttatcaacttgaaaaagtggcaccgagtcggtgctaaagttaattatgtgcctggtccaaggaactggca

SEQ ID NO: 1085 - RNA, 133 nt, synthetic construct
  source 1..133: mol_type = other RNA
ggatgccagttccttggaccgttttagagctagaaatagcaagttaaaataaggctagtccgttatcaacttgaaaaagtggcaccgagtcggtgctaaagttaattatgtgcctggtccaaggaactggcat

SEQ ID NO: 1086 - RNA, 129 nt, synthetic construct
  source 1..129: mol_type = other RNA
ggatgccagttccttggaccgttttagagctagaaatagcaagttaaaataaggctagtccgttatcaacttgaaaaagtggcaccgagtcggtgcctaaagttaattatgtgcctggtccaaggaact

SEQ ID NO: 1087 - RNA, 130 nt, synthetic construct
  source 1..130: mol_type = other RNA
ggatgccagttccttggaccgttttagagctagaaatagcaagttaaaataaggctagtccgttatcaacttgaaaaagtggcaccgagtcggtgcctaaagttaattatgtgcctggtccaaggaactg

SEQ ID NO: 1088 - RNA, 131 nt, synthetic construct
  source 1..131: mol_type = other RNA
ggatgccagttccttggaccgttttagagctagaaatagcaagttaaaataaggctagtccgttatcaacttgaaaaagtggcaccgagtcggtgcctaaagttaattatgtgcctggtccaaggaactgg

SEQ ID NO: 1089 - RNA, 132 nt, synthetic construct
  source 1..132: mol_type = other RNA
ggatgccagttccttggaccgttttagagctagaaatagcaagttaaaataaggctagtccgttatcaacttgaaaaagtggcaccgagtcggtgcctaaagttaattatgtgcctggtccaaggaactggc

SEQ ID NO: 1090 - RNA, 133 nt, synthetic construct
  source 1..133: mol_type = other RNA
ggatgccagttccttggaccgttttagagctagaaatagcaagttaaaataaggctagtccgttatcaacttgaaaaagtggcaccgagtcggtgcctaaagttaattatgtgcctggtccaaggaactggca

SEQ ID NO: 1091 - RNA, 134 nt, synthetic construct
  source 1..134: mol_type = other RNA
ggatgccagttccttggaccgttttagagctagaaatagcaagttaaaataaggctagtccgttatcaacttgaaaaagtggcaccgagtcggtgcctaaagttaattatgtgcctggtccaaggaactggcat

SEQ ID NO: 1092 - RNA, 130 nt, synthetic construct
  source 1..130: mol_type = other RNA
ggatgccagttccttggaccgttttagagctagaaatagcaagttaaaataaggctagtccgttatcaacttgaaaaagtggcaccgagtcggtgccctaaagttaattatgtgcctggtccaaggaact

SEQ ID NO: 1093 - RNA, 131 nt, synthetic construct
  source 1..131: mol_type = other RNA
ggatgccagttccttggaccgttttagagctagaaatagcaagttaaaataaggctagtccgttatcaacttgaaaaagtggcaccgagtcggtgccctaaagttaattatgtgcctggtccaaggaactg

SEQ ID NO: 1094 - RNA, 132 nt, synthetic construct
  source 1..132: mol_type = other RNA
ggatgccagttccttggaccgttttagagctagaaatagcaagttaaaataaggctagtccgttatcaacttgaaaaagtggcaccgagtcggtgccctaaagttaattatgtgcctggtccaaggaactgg

SEQ ID NO: 1095 - RNA, 133 nt, synthetic construct
  source 1..133: mol_type = other RNA
ggatgccagttccttggaccgttttagagctagaaatagcaagttaaaataaggctagtccgttatcaacttgaaaaagtggcaccgagtcggtgccctaaagttaattatgtgcctggtccaaggaactggc

SEQ ID NO: 1096 - RNA, 134 nt, synthetic construct
  source 1..134: mol_type = other RNA
ggatgccagttccttggaccgttttagagctagaaatagcaagttaaaataaggctagtccgttatcaacttgaaaaagtggcaccgagtcggtgccctaaagttaattatgtgcctggtccaaggaactggca

SEQ ID NO: 1097 - RNA, 135 nt, synthetic construct
  source 1..135: mol_type = other RNA
ggatgccagttccttggaccgttttagagctagaaatagcaagttaaaataaggctagtccgttatcaacttgaaaaagtggcaccgagtcggtgccctaaagttaattatgtgcctggtccaaggaactggcat

SEQ ID NO: 1098 - RNA, 131 nt, synthetic construct
  source 1..131: mol_type = other RNA
ggatgccagttccttggaccgttttagagctagaaatagcaagttaaaataaggctagtccgttatcaacttgaaaaagtggcaccgagtcggtgcacctaaagttaattatgtgcctggtccaaggaact

SEQ ID NO: 1099 - RNA, 132 nt, synthetic construct
  source 1..132: mol_type = other RNA
ggatgccagttccttggaccgttttagagctagaaatagcaagttaaaataaggctagtccgttatcaacttgaaaaagtggcaccgagtcggtgcacctaaagttaattatgtgcctggtccaaggaactg

SEQ ID NO: 1100 - RNA, 133 nt, synthetic construct
  source 1..133: mol_type = other RNA
ggatgccagttccttggaccgttttagagctagaaatagcaagttaaaataaggctagtccgttatcaacttgaaaaagtggcaccgagtcggtgcacctaaagttaattatgtgcctggtccaaggaactgg

SEQ ID NO: 1101 - RNA, 134 nt, synthetic construct
  source 1..134: mol_type = other RNA
ggatgccagttccttggaccgttttagagctagaaatagcaagttaaaataaggctagtccgttatcaacttgaaaaagtggcaccgagtcggtgcacctaaagttaattatgtgcctggtccaaggaactggc

SEQ ID NO: 1102 - RNA, 135 nt, synthetic construct
  source 1..135: mol_type = other RNA
ggatgccagttccttggaccgttttagagctagaaatagcaagttaaaataaggctagtccgttatcaacttgaaaaagtggcaccgagtcggtgcacctaaagttaattatgtgcctggtccaaggaactggca

SEQ ID NO: 1103 - RNA, 136 nt, synthetic construct
  source 1..136: mol_type = other RNA
ggatgccagttccttggaccgttttagagctagaaatagcaagttaaaataaggctagtccgttatcaacttgaaaaagtggcaccgagtcggtgcacctaaagttaattatgtgcctggtccaaggaactggcat

SEQ ID NO: 1104 - RNA, 132 nt, synthetic construct
  source 1..132: mol_type = other RNA
ggatgccagttccttggaccgttttagagctagaaatagcaagttaaaataaggctagtccgttatcaacttgaaaaagtggcaccgagtcggtgctacctaaagttaattatgtgcctggtccaaggaact

SEQ ID NO: 1105 - RNA, 133 nt, synthetic construct
  source 1..133: mol_type = other RNA
ggatgccagttccttggaccgttttagagctagaaatagcaagttaaaataaggctagtccgttatcaacttgaaaaagtggcaccgagtcggtgctacctaaagttaattatgtgcctggtccaaggaactg

SEQ ID NO: 1106 - RNA, 134 nt, synthetic construct
  source 1..134: mol_type = other RNA
ggatgccagttccttggaccgttttagagctagaaatagcaagttaaaataaggctagtccgttatcaacttgaaaaagtggcaccgagtcggtgctacctaaagttaattatgtgcctggtccaaggaactgg

SEQ ID NO: 1107 - RNA, 135 nt, synthetic construct
  source 1..135: mol_type = other RNA
ggatgccagttccttggaccgttttagagctagaaatagcaagttaaaataaggctagtccgttatcaacttgaaaaagtggcaccgagtcggtgctacctaaagttaattatgtgcctggtccaaggaactggc

SEQ ID NO: 1108 - RNA, 136 nt, synthetic construct
  source 1..136: mol_type = other RNA
ggatgccagttccttggaccgttttagagctagaaatagcaagttaaaataaggctagtccgttatcaacttgaaaaagtggcaccgagtcggtgctacctaaagttaattatgtgcctggtccaaggaactggca

SEQ ID NO: 1109 - RNA, 137 nt, synthetic construct
  source 1..137: mol_type = other RNA
ggatgccagttccttggaccgttttagagctagaaatagcaagttaaaataaggctagtccgttatcaacttgaaaaagtggcaccgagtcggtgctacctaaagttaattatgtgcctggtccaaggaactggcat

SEQ ID NO: 1110 - RNA, 133 nt, synthetic construct
  source 1..133: mol_type = other RNA
ggatgccagttccttggaccgttttagagctagaaatagcaagttaaaataaggctagtccgttatcaacttgaaaaagtggcaccgagtcggtgcatacctaaagttaattatgtgcctggtccaaggaact

SEQ ID NO: 1111 - RNA, 134 nt, synthetic construct
  source 1..134: mol_type = other RNA
ggatgccagttccttggaccgttttagagctagaaatagcaagttaaaataaggctagtccgttatcaacttgaaaaagtggcaccgagtcggtgcatacctaaagttaattatgtgcctggtccaaggaactg

SEQ ID NO: 1112 - RNA, 135 nt, synthetic construct
  source 1..135: mol_type = other RNA
ggatgccagttccttggaccgttttagagctagaaatagcaagttaaaataaggctagtccgttatcaacttgaaaaagtggcaccgagtcggtgcatacctaaagttaattatgtgcctggtccaaggaactgg

SEQ ID NO: 1113 - RNA, 136 nt, synthetic construct
  source 1..136: mol_type = other RNA
ggatgccagttccttggaccgttttagagctagaaatagcaagttaaaataaggctagtccgttatcaacttgaaaaagtggcaccgagtcggtgcatacctaaagttaattatgtgcctggtccaaggaactggc

SEQ ID NO: 1114 - RNA, 137 nt, synthetic construct
  source 1..137: mol_type = other RNA
ggatgccagttccttggaccgttttagagctagaaatagcaagttaaaataaggctagtccgttatcaacttgaaaaagtggcaccgagtcggtgcatacctaaagttaattatgtgcctggtccaaggaactggca

SEQ ID NO: 1115 - RNA, 138 nt, synthetic construct
  source 1..138: mol_type = other RNA
ggatgccagttccttggaccgttttagagctagaaatagcaagttaaaataaggctagtccgttatcaacttgaaaaagtggcaccgagtcggtgcatacctaaagttaattatgtgcctggtccaaggaactggcat

SEQ ID NO: 1116 - RNA, 134 nt, synthetic construct
  source 1..134: mol_type = other RNA
ggatgccagttccttggaccgttttagagctagaaatagcaagttaaaataaggctagtccgttatcaacttgaaaaagtggcaccgagtcggtgcaatacctaaagttaattatgtgcctggtccaaggaact

SEQ ID NO: 1117 - RNA, 135 nt, synthetic construct
  source 1..135: mol_type = other RNA
ggatgccagttccttggaccgttttagagctagaaatagcaagttaaaataaggctagtccgttatcaacttgaaaaagtggcaccgagtcggtgcaatacctaaagttaattatgtgcctggtccaaggaactg

SEQ ID NO: 1118 - RNA, 136 nt, synthetic construct
  source 1..136: mol_type = other RNA
ggatgccagttccttggaccgttttagagctagaaatagcaagttaaaataaggctagtccgttatcaacttgaaaaagtggcaccgagtcggtgcaatacctaaagttaattatgtgcctggtccaaggaactgg

SEQ ID NO: 1119 - RNA, 137 nt, synthetic construct
  source 1..137: mol_type = other RNA
ggatgccagttccttggaccgttttagagctagaaatagcaagttaaaataaggctagtccgttatcaacttgaaaaagtggcaccgagtcggtgcaatacctaaagttaattatgtgcctggtccaaggaactggc

SEQ ID NO: 1120 - RNA, 138 nt, synthetic construct
  source 1..138: mol_type = other RNA
ggatgccagttccttggaccgttttagagctagaaatagcaagttaaaataaggctagtccgttatcaacttgaaaaagtggcaccgagtcggtgcaatacctaaagttaattatgtgcctggtccaaggaactggca

SEQ ID NO: 1121 - RNA, 139 nt, synthetic construct
  source 1..139: mol_type = other RNA
ggatgccagttccttggaccgttttagagctagaaatagcaagttaaaataaggctagtccgttatcaacttgaaaaagtggcaccgagtcggtgcaatacctaaagttaattatgtgcctggtccaaggaactggcat

SEQ ID NO: 1122 - RNA, 135 nt, synthetic construct
  source 1..135: mol_type = other RNA
ggatgccagttccttggaccgttttagagctagaaatagcaagttaaaataaggctagtccgttatcaacttgaaaaagtggcaccgagtcggtgcaaatacctaaagttaattatgtgcctggtccaaggaact

SEQ ID NO: 1123 - RNA, 136 nt, synthetic construct
  source 1..136: mol_type = other RNA
ggatgccagttccttggaccgttttagagctagaaatagcaagttaaaataaggctagtccgttatcaacttgaaaaagtggcaccgagtcggtgcaaatacctaaagttaattatgtgcctggtccaaggaactg

SEQ ID NO: 1124 - RNA, 137 nt, synthetic construct
  source 1..137: mol_type = other RNA
ggatgccagttccttggaccgttttagagctagaaatagcaagttaaaataaggctagtccgttatcaacttgaaaaagtggcaccgagtcggtgcaaatacctaaagttaattatgtgcctggtccaaggaactgg

SEQ ID NO: 1125 - RNA, 138 nt, synthetic construct
  source 1..138: mol_type = other RNA
ggatgccagttccttggaccgttttagagctagaaatagcaagttaaaataaggctagtccgttatcaacttgaaaaagtggcaccgagtcggtgcaaatacctaaagttaattatgtgcctggtccaaggaactggc

SEQ ID NO: 1126 - RNA, 139 nt, synthetic construct
  source 1..139: mol_type = other RNA
ggatgccagttccttggaccgttttagagctagaaatagcaagttaaaataaggctagtccgttatcaacttgaaaaagtggcaccgagtcggtgcaaatacctaaagttaattatgtgcctggtccaaggaactggca

SEQ ID NO: 1127 - RNA, 140 nt, synthetic construct
  source 1..140: mol_type = other RNA
ggatgccagttccttggaccgttttagagctagaaatagcaagttaaaataaggctagtccgttatcaacttgaaaaagtggcaccgagtcggtgcaaatacctaaagttaattatgtgcctggtccaaggaactggcat

SEQ ID NO: 1128 - RNA, 136 nt, synthetic construct
  source 1..136: mol_type = other RNA
ggatgccagttccttggaccgttttagagctagaaatagcaagttaaaataaggctagtccgttatcaacttgaaaaagtggcaccgagtcggtgctaaatacctaaagttaattatgtgcctggtccaaggaact

SEQ ID NO: 1129 - RNA, 137 nt, synthetic construct
  source 1..137: mol_type = other RNA
ggatgccagttccttggaccgttttagagctagaaatagcaagttaaaataaggctagtccgttatcaacttgaaaaagtggcaccgagtcggtgctaaatacctaaagttaattatgtgcctggtccaaggaactg

SEQ ID NO: 1130 - RNA, 138 nt, synthetic construct
  source 1..138: mol_type = other RNA
ggatgccagttccttggaccgttttagagctagaaatagcaagttaaaataaggctagtccgttatcaacttgaaaaagtggcaccgagtcggtgctaaatacctaaagttaattatgtgcctggtccaaggaactgg

SEQ ID NO: 1131 - RNA, 139 nt, synthetic construct
  source 1..139: mol_type = other RNA
ggatgccagttccttggaccgttttagagctagaaatagcaagttaaaataaggctagtccgttatcaacttgaaaaagtggcaccgagtcggtgctaaatacctaaagttaattatgtgcctggtccaaggaactggc

SEQ ID NO: 1132 - RNA, 140 nt, synthetic construct
  source 1..140: mol_type = other RNA
ggatgccagttccttggaccgttttagagctagaaatagcaagttaaaataaggctagtccgttatcaacttgaaaaagtggcaccgagtcggtgctaaatacctaaagttaattatgtgcctggtccaaggaactggca

SEQ ID NO: 1133 - RNA, 141 nt, synthetic construct
  source 1..141: mol_type = other RNA
ggatgccagttccttggaccgttttagagctagaaatagcaagttaaaataaggctagtccgttatcaacttgaaaaagtggcaccgagtcggtgctaaatacctaaagttaattatgtgcctggtccaaggaactggcat

SEQ ID NO: 1134 - RNA, 120 nt, synthetic construct
  source 1..120: mol_type = other RNA
gctaggggatgccagttcctgttttagagctagaaatagcaagttaaaataaggctagtccgttatcaacttgaaaaagtggcaccgagtcggtgctgcctggtccaaggaactggcatc

SEQ ID NO: 1135 - RNA, 121 nt, synthetic construct
  source 1..121: mol_type = other RNA
gctaggggatgccagttcctgttttagagctagaaatagcaagttaaaataaggctagtccgttatcaacttgaaaaagtggcaccgagtcggtgctgcctggtccaaggaactggcatcc

SEQ ID NO: 1136 - RNA, 122 nt, synthetic construct
  source 1..122: mol_type = other RNA
gctaggggatgccagttcctgttttagagctagaaatagcaagttaaaataaggctagtccgttatcaacttgaaaaagtggcaccgagtcggtgctgcctggtccaaggaactggcatccc

SEQ ID NO: 1137 - RNA, 123 nt, synthetic construct
  source 1..123: mol_type = other RNA
gctaggggatgccagttcctgttttagagctagaaatagcaagttaaaataaggctagtccgttatcaacttgaaaaagtggcaccgagtcggtgctgcctggtccaaggaactggcatcccc

SEQ ID NO: 1138 - RNA, 124 nt, synthetic construct
  source 1..124: mol_type = other RNA
gctaggggatgccagttcctgttttagagctagaaatagcaagttaaaataaggctagtccgttatcaacttgaaaaagtggcaccgagtcggtgctgcctggtccaaggaactggcatcccct

SEQ ID NO: 1139 - RNA, 125 nt, synthetic construct
  source 1..125: mol_type = other RNA
gctaggggatgccagttcctgttttagagctagaaatagcaagttaaaataaggctagtccgttatcaacttgaaaaagtggcaccgagtcggtgctgcctggtccaaggaactggcatccccta

SEQ ID NO: 1140 - RNA, 121 nt, synthetic construct
  source 1..121: mol_type = other RNA
gctaggggatgccagttcctgttttagagctagaaatagcaagttaaaataaggctagtccgttatcaacttgaaaaagtggcaccgagtcggtgcgtgcctggtccaaggaactggcatc

SEQ ID NO: 1141 - RNA, 122 nt, synthetic construct
  source 1..122: mol_type = other RNA
gctaggggatgccagttcctgttttagagctagaaatagcaagttaaaataaggctagtccgttatcaacttgaaaaagtggcaccgagtcggtgcgtgcctggtccaaggaactggcatcc

SEQ ID NO: 1142 - RNA, 123 nt, synthetic construct
  source 1..123: mol_type = other RNA
gctaggggatgccagttcctgttttagagctagaaatagcaagttaaaataaggctagtccgttatcaacttgaaaaagtggcaccgagtcggtgcgtgcctggtccaaggaactggcatccc

SEQ ID NO: 1143 - RNA, 124 nt, synthetic construct
  source 1..124: mol_type = other RNA
gctaggggatgccagttcctgttttagagctagaaatagcaagttaaaataaggctagtccgttatcaacttgaaaaagtggcaccgagtcggtgcgtgcctggtccaaggaactggcatcccc

SEQ ID NO: 1144 - RNA, 125 nt, synthetic construct
  source 1..125: mol_type = other RNA
gctaggggatgccagttcctgttttagagctagaaatagcaagttaaaataaggctagtccgttatcaacttgaaaaagtggcaccgagtcggtgcgtgcctggtccaaggaactggcatcccct

SEQ ID NO: 1145 - RNA, 126 nt, synthetic construct
  source 1..126: mol_type = other RNA
gctaggggatgccagttcctgttttagagctagaaatagcaagttaaaataaggctagtccgttatcaacttgaaaaagtggcaccgagtcggtgcgtgcctggtccaaggaactggcatccccta

SEQ ID NO: 1146 - RNA, 122 nt, synthetic construct
  source 1..122: mol_type = other RNA
gctaggggatgccagttcctgttttagagctagaaatagcaagttaaaataaggctagtccgttatcaacttgaaaaagtggcaccgagtcggtgctgtgcctggtccaaggaactggcatc

SEQ ID NO: 1147 - RNA, 123 nt, synthetic construct
  source 1..123: mol_type = other RNA
gctaggggatgccagttcctgttttagagctagaaatagcaagttaaaataaggctagtccgttatcaacttgaaaaagtggcaccgagtcggtgctgtgcctggtccaaggaactggcatcc

SEQ ID NO: 1148 - RNA, 124 nt, synthetic construct
  source 1..124: mol_type = other RNA
gctaggggatgccagttcctgttttagagctagaaatagcaagttaaaataaggctagtccgttatcaacttgaaaaagtggcaccgagtcggtgctgtgcctggtccaaggaactggcatccc

SEQ ID NO: 1149 - RNA, 125 nt, synthetic construct
  source 1..125: mol_type = other RNA
gctaggggatgccagttcctgttttagagctagaaatagcaagttaaaataaggctagtccgttatcaacttgaaaaagtggcaccgagtcggtgctgtgcctggtccaaggaactggcatcccc

SEQ ID NO: 1150 - RNA, 126 nt, synthetic construct
  source 1..126: mol_type = other RNA
gctaggggatgccagttcctgttttagagctagaaatagcaagttaaaataaggctagtccgttatcaacttgaaaaagtggcaccgagtcggtgctgtgcctggtccaaggaactggcatcccct

SEQ ID NO: 1151 - RNA, 127 nt, synthetic construct
  source 1..127: mol_type = other RNA
gctaggggatgccagttcctgttttagagctagaaatagcaagttaaaataaggctagtccgttatcaacttgaaaaagtggcaccgagtcggtgctgtgcctggtccaaggaactggcatccccta

SEQ ID NO: 1152 - RNA, 123 nt, synthetic construct
  source 1..123: mol_type = other RNA
gctaggggatgccagttcctgttttagagctagaaatagcaagttaaaataaggctagtccgttatcaacttgaaaaagtggcaccgagtcggtgcatgtgcctggtccaaggaactggcatc

SEQ ID NO: 1153 - RNA, 124 nt, synthetic construct
  source 1..124: mol_type = other RNA
gctaggggatgccagttcctgttttagagctagaaatagcaagttaaaataaggctagtccgttatcaacttgaaaaagtggcaccgagtcggtgcatgtgcctggtccaaggaactggcatcc

SEQ ID NO: 1154 - RNA, 125 nt, synthetic construct
  source 1..125: mol_type = other RNA
gctaggggatgccagttcctgttttagagctagaaatagcaagttaaaataaggctagtccgttatcaacttgaaaaagtggcaccgagtcggtgcatgtgcctggtccaaggaactggcatccc

SEQ ID NO: 1155 - RNA, 126 nt, synthetic construct
  source 1..126: mol_type = other RNA
gctaggggatgccagttcctgttttagagctagaaatagcaagttaaaataaggctagtccgttatcaacttgaaaaagtggcaccgagtcggtgcatgtgcctggtccaaggaactggcatcccc

SEQ ID NO: 1156 - RNA, 127 nt, synthetic construct
  source 1..127: mol_type = other RNA
gctaggggatgccagttcctgttttagagctagaaatagcaagttaaaataaggctagtccgttatcaacttgaaaaagtggcaccgagtcggtgcatgtgcctggtccaaggaactggcatcccct

SEQ ID NO: 1157 - RNA, 128 nt, synthetic construct
  source 1..128: mol_type = other RNA
gctaggggatgccagttcctgttttagagctagaaatagcaagttaaaataaggctagtccgttatcaacttgaaaaagtggcaccgagtcggtgcatgtgcctggtccaaggaactggcatccccta

SEQ ID NO: 1158 - RNA, 124 nt, synthetic construct
  source 1..124: mol_type = other RNA
gctaggggatgccagttcctgttttagagctagaaatagcaagttaaaataaggctagtccgttatcaacttgaaaaagtggcaccgagtcggtgctatgtgcctggtccaaggaactggcatc

SEQ ID NO: 1159 - RNA, 125 nt, synthetic construct
  source 1..125: mol_type = other RNA
gctaggggatgccagttcctgttttagagctagaaatagcaagttaaaataaggctagtccgttatcaacttgaaaaagtggcaccgagtcggtgctatgtgcctggtccaaggaactggcatcc

SEQ ID NO: 1160 - RNA, 126 nt, synthetic construct
  source 1..126: mol_type = other RNA
gctaggggatgccagttcctgttttagagctagaaatagcaagttaaaataaggctagtccgttatcaacttgaaaaagtggcaccgagtcggtgctatgtgcctggtccaaggaactggcatccc

SEQ ID NO: 1161 - RNA, 127 nt, synthetic construct
  source 1..127: mol_type = other RNA
gctaggggatgccagttcctgttttagagctagaaatagcaagttaaaataaggctagtccgttatcaacttgaaaaagtggcaccgagtcggtgctatgtgcctggtccaaggaactggcatcccc

SEQ ID NO: 1162 - RNA, 128 nt, synthetic construct
  source 1..128: mol_type = other RNA
gctaggggatgccagttcctgttttagagctagaaatagcaagttaaaataaggctagtccgttatcaacttgaaaaagtggcaccgagtcggtgctatgtgcctggtccaaggaactggcatcccct

SEQ ID NO: 1163 - RNA, 129 nt, synthetic construct
  source 1..129: mol_type = other RNA
gctaggggatgccagttcctgttttagagctagaaatagcaagttaaaataaggctagtccgttatcaacttgaaaaagtggcaccgagtcggtgctatgtgcctggtccaaggaactggcatccccta

SEQ ID NO: 1164 - RNA, 125 nt, synthetic construct
  source 1..125: mol_type = other RNA
gctaggggatgccagttcctgttttagagctagaaatagcaagttaaaataaggctagtccgttatcaacttgaaaaagtggcaccgagtcggtgcttatgtgcctggtccaaggaactggcatc

SEQ ID NO: 1165 - RNA, 126 nt, synthetic construct
  source 1..126: mol_type = other RNA
gctaggggatgccagttcctgttttagagctagaaatagcaagttaaaataaggctagtccgttatcaacttgaaaaagtggcaccgagtcggtgcttatgtgcctggtccaaggaactggcatcc

SEQ ID NO: 1166 - RNA, 127 nt, synthetic construct
  source 1..127: mol_type = other RNA
gctaggggatgccagttcctgttttagagctagaaatagcaagttaaaataaggctagtccgttatcaacttgaaaaagtggcaccgagtcggtgcttatgtgcctggtccaaggaactggcatccc

SEQ ID NO: 1167 - RNA, 128 nt, synthetic construct
  source 1..128: mol_type = other RNA
gctaggggatgccagttcctgttttagagctagaaatagcaagttaaaataaggctagtccgttatcaacttgaaaaagtggcaccgagtcggtgcttatgtgcctggtccaaggaactggcatcccc

SEQ ID NO: 1168 - RNA, 129 nt, synthetic construct
  source 1..129: mol_type = other RNA
gctaggggatgccagttcctgttttagagctagaaatagcaagttaaaataaggctagtccgttatcaacttgaaaaagtggcaccgagtcggtgcttatgtgcctggtccaaggaactggcatcccct

SEQ ID NO: 1169 - RNA, 130 nt, synthetic construct
  source 1..130: mol_type = other RNA
gctaggggatgccagttcctgttttagagctagaaatagcaagttaaaataaggctagtccgttatcaacttgaaaaagtggcaccgagtcggtgcttatgtgcctggtccaaggaactggcatccccta

SEQ ID NO: 1170 - RNA, 126 nt, synthetic construct
  source 1..126: mol_type = other RNA
gctaggggatgccagttcctgttttagagctagaaatagcaagttaaaataaggctagtccgttatcaacttgaaaaagtggcaccgagtcggtgcattatgtgcctggtccaaggaactggcatc

SEQ ID NO: 1171 - RNA, 127 nt, synthetic construct
  source 1..127: mol_type = other RNA
gctaggggatgccagttcctgttttagagctagaaatagcaagttaaaataaggctagtccgttatcaacttgaaaaagtggcaccgagtcggtgcattatgtgcctggtccaaggaactggcatcc

SEQ ID NO: 1172 - RNA, 128 nt, synthetic construct
  source 1..128: mol_type = other RNA
gctaggggatgccagttcctgttttagagctagaaatagcaagttaaaataaggctagtccgttatcaacttgaaaaagtggcaccgagtcggtgcattatgtgcctggtccaaggaactggcatccc

SEQ ID NO: 1173 - RNA, 129 nt, synthetic construct
  source 1..129: mol_type = other RNA
gctaggggatgccagttcctgttttagagctagaaatagcaagttaaaataaggctagtccgttatcaacttgaaaaagtggcaccgagtcggtgcattatgtgcctggtccaaggaactggcatcccc

SEQ ID NO: 1174 - RNA, 130 nt, synthetic construct
  source 1..130: mol_type = other RNA
gctaggggatgccagttcctgttttagagctagaaatagcaagttaaaataaggctagtccgttatcaacttgaaaaagtggcaccgagtcggtgcattatgtgcctggtccaaggaactggcatcccct

SEQ ID NO: 1175 - RNA, 131 nt, synthetic construct
  source 1..131: mol_type = other RNA
gctaggggatgccagttcctgttttagagctagaaatagcaagttaaaataaggctagtccgttatcaacttgaaaaagtggcaccgagtcggtgcattatgtgcctggtccaaggaactggcatccccta

SEQ ID NO: 1176 - RNA, 127 nt, synthetic construct
  source 1..127: mol_type = other RNA
gctaggggatgccagttcctgttttagagctagaaatagcaagttaaaataaggctagtccgttatcaacttgaaaaagtggcaccgagtcggtgcaattatgtgcctggtccaaggaactggcatc

SEQ ID NO: 1177 - RNA, 128 nt, synthetic construct
  source 1..128: mol_type = other RNA
gctaggggatgccagttcctgttttagagctagaaatagcaagttaaaataaggctagtccgttatcaacttgaaaaagtggcaccgagtcggtgcaattatgtgcctggtccaaggaactggcatcc

SEQ ID NO: 1178 - RNA, 129 nt, synthetic construct
  source 1..129: mol_type = other RNA
gctaggggatgccagttcctgttttagagctagaaatagcaagttaaaataaggctagtccgttatcaacttgaaaaagtggcaccgagtcggtgcaattatgtgcctggtccaaggaactggcatccc

SEQ ID NO: 1179 - RNA, 130 nt, synthetic construct
  source 1..130: mol_type = other RNA
gctaggggatgccagttcctgttttagagctagaaatagcaagttaaaataaggctagtccgttatcaacttgaaaaagtggcaccgagtcggtgcaattatgtgcctggtccaaggaactggcatcccc

SEQ ID NO: 1180 - RNA, 131 nt, synthetic construct
  source 1..131: mol_type = other RNA
gctaggggatgccagttcctgttttagagctagaaatagcaagttaaaataaggctagtccgttatcaacttgaaaaagtggcaccgagtcggtgcaattatgtgcctggtccaaggaactggcatcccct

SEQ ID NO: 1181 - RNA, 132 nt, synthetic construct
  source 1..132: mol_type = other RNA
gctaggggatgccagttcctgttttagagctagaaatagcaagttaaaataaggctagtccgttatcaacttgaaaaagtggcaccgagtcggtgcaattatgtgcctggtccaaggaactggcatccccta

SEQ ID NO: 1182 - RNA, 128 nt, synthetic construct
  source 1..128: mol_type = other RNA
gctaggggatgccagttcctgttttagagctagaaatagcaagttaaaataaggctagtccgttatcaacttgaaaaagtggcaccgagtcggtgctaattatgtgcctggtccaaggaactggcatc

SEQ ID NO: 1183 - RNA, 129 nt, synthetic construct
  source 1..129: mol_type = other RNA
gctaggggatgccagttcctgttttagagctagaaatagcaagttaaaataaggctagtccgttatcaacttgaaaaagtggcaccgagtcggtgctaattatgtgcctggtccaaggaactggcatcc

SEQ ID NO: 1184 - RNA, 130 nt, synthetic construct
  source 1..130: mol_type = other RNA
gctaggggatgccagttcctgttttagagctagaaatagcaagttaaaataaggctagtccgttatcaacttgaaaaagtggcaccgagtcggtgctaattatgtgcctggtccaaggaactggcatccc

SEQ ID NO: 1185 - RNA, 131 nt, synthetic construct
  source 1..131: mol_type = other RNA
gctaggggatgccagttcctgttttagagctagaaatagcaagttaaaataaggctagtccgttatcaacttgaaaaagtggcaccgagtcggtgctaattatgtgcctggtccaaggaactggcatcccc

SEQ ID NO: 1186 - RNA, 132 nt, synthetic construct
  source 1..132: mol_type = other RNA
gctaggggatgccagttcctgttttagagctagaaatagcaagttaaaataaggctagtccgttatcaacttgaaaaagtggcaccgagtcggtgctaattatgtgcctggtccaaggaactggcatcccct

SEQ ID NO: 1187 - RNA, 133 nt, synthetic construct
  source 1..133: mol_type = other RNA
gctaggggatgccagttcctgttttagagctagaaatagcaagttaaaataaggctagtccgttatcaacttgaaaaagtggcaccgagtcggtgctaattatgtgcctggtccaaggaactggcatccccta

SEQ ID NO: 1188 - RNA, 129 nt, synthetic construct
  source 1..129: mol_type = other RNA
gctaggggatgccagttcctgttttagagctagaaatagcaagttaaaataaggctagtccgttatcaacttgaaaaagtggcaccgagtcggtgcttaattatgtgcctggtccaaggaactggcatc

SEQ ID NO: 1189 - RNA, 130 nt, synthetic construct
  source 1..130: mol_type = other RNA
gctaggggatgccagttcctgttttagagctagaaatagcaagttaaaataaggctagtccgttatcaacttgaaaaagtggcaccgagtcggtgcttaattatgtgcctggtccaaggaactggcatcc

SEQ ID NO: 1190 - RNA, 131 nt, synthetic construct
  source 1..131: mol_type = other RNA
gctaggggatgccagttcctgttttagagctagaaatagcaagttaaaataaggctagtccgttatcaacttgaaaaagtggcaccgagtcggtgcttaattatgtgcctggtccaaggaactggcatccc

SEQ ID NO: 1191 - RNA, 132 nt, synthetic construct
  source 1..132: mol_type = other RNA
gctaggggatgccagttcctgttttagagctagaaatagcaagttaaaataaggctagtccgttatcaacttgaaaaagtggcaccgagtcggtgcttaattatgtgcctggtccaaggaactggcatcccc

SEQ ID NO: 1192 - RNA, 133 nt, synthetic construct
  source 1..133: mol_type = other RNA
gctaggggatgccagttcctgttttagagctagaaatagcaagttaaaataaggctagtccgttatcaacttgaaaaagtggcaccgagtcggtgcttaattatgtgcctggtccaaggaactggcatcccct

SEQ ID NO: 1193 - RNA, 134 nt, synthetic construct
  source 1..134: mol_type = other RNA
gctaggggatgccagttcctgttttagagctagaaatagcaagttaaaataaggctagtccgttatcaacttgaaaaagtggcaccgagtcggtgcttaattatgtgcctggtccaaggaactggcatccccta

SEQ ID NO: 1194 - RNA, 130 nt, synthetic construct
  source 1..130: mol_type = other RNA
gctaggggatgccagttcctgttttagagctagaaatagcaagttaaaataaggctagtccgttatcaacttgaaaaagtggcaccgagtcggtgcgttaattatgtgcctggtccaaggaactggcatc

SEQ ID NO: 1195 - RNA, 131 nt, synthetic construct
  source 1..131: mol_type = other RNA
gctaggggatgccagttcctgttttagagctagaaatagcaagttaaaataaggctagtccgttatcaacttgaaaaagtggcaccgagtcggtgcgttaattatgtgcctggtccaaggaactggcatcc

SEQ ID NO: 1196 - RNA, 132 nt, synthetic construct
  source 1..132: mol_type = other RNA
gctaggggatgccagttcctgttttagagctagaaatagcaagttaaaataaggctagtccgttatcaacttgaaaaagtggcaccgagtcggtgcgttaattatgtgcctggtccaaggaactggcatccc

SEQ ID NO: 1197 - RNA, 133 nt, synthetic construct
  source 1..133: mol_type = other RNA
gctaggggatgccagttcctgttttagagctagaaatagcaagttaaaataaggctagtccgttatcaacttgaaaaagtggcaccgagtcggtgcgttaattatgtgcctggtccaaggaactggcatcccc

SEQ ID NO: 1198 - RNA, 134 nt, synthetic construct
  source 1..134: mol_type = other RNA
gctaggggatgccagttcctgttttagagctagaaatagcaagttaaaataaggctagtccgttatcaacttgaaaaagtggcaccgagtcggtgcgttaattatgtgcctggtccaaggaactggcatcccct

SEQ ID NO: 1199 - RNA, 135 nt, synthetic construct
  source 1..135: mol_type = other RNA
gctaggggatgccagttcctgttttagagctagaaatagcaagttaaaataaggctagtccgttatcaacttgaaaaagtggcaccgagtcggtgcgttaattatgtgcctggtccaaggaactggcatccccta

SEQ ID NO: 1200 - RNA, 131 nt, synthetic construct
  source 1..131: mol_type = other RNA
gctaggggatgccagttcctgttttagagctagaaatagcaagttaaaataaggctagtccgttatcaacttgaaaaagtggcaccgagtcggtgcagttaattatgtgcctggtccaaggaactggcatc

SEQ ID NO: 1201 - RNA, 132 nt, synthetic construct
  source 1..132: mol_type = other RNA
gctaggggatgccagttcctgttttagagctagaaatagcaagttaaaataaggctagtccgttatcaacttgaaaaagtggcaccgagtcggtgcagttaattatgtgcctggtccaaggaactggcatcc

SEQ ID NO: 1202 - RNA, 133 nt, synthetic construct
  source 1..133: mol_type = other RNA
gctaggggatgccagttcctgttttagagctagaaatagcaagttaaaataaggctagtccgttatcaacttgaaaaagtggcaccgagtcggtgcagttaattatgtgcctggtccaaggaactggcatccc

SEQ ID NO: 1203 - RNA, 134 nt, synthetic construct
  source 1..134: mol_type = other RNA
gctaggggatgccagttcctgttttagagctagaaatagcaagttaaaataaggctagtccgttatcaacttgaaaaagtggcaccgagtcggtgcagttaattatgtgcctggtccaaggaactggcatcccc

SEQ ID NO: 1204 - RNA, 135 nt, synthetic construct
  source 1..135: mol_type = other RNA
gctaggggatgccagttcctgttttagagctagaaatagcaagttaaaataaggctagtccgttatcaacttgaaaaagtggcaccgagtcggtgcagttaattatgtgcctggtccaaggaactggcatcccct

SEQ ID NO: 1205 - RNA, 136 nt, synthetic construct
  source 1..136: mol_type = other RNA
gctaggggatgccagttcctgttttagagctagaaatagcaagttaaaataaggctagtccgttatcaacttgaaaaagtggcaccgagtcggtgcagttaattatgtgcctggtccaaggaactggcatccccta

SEQ ID NO: 1206 - RNA, 132 nt, synthetic construct
  source 1..132: mol_type = other RNA
gctaggggatgccagttcctgttttagagctagaaatagcaagttaaaataaggctagtccgttatcaacttgaaaaagtggcaccgagtcggtgcaagttaattatgtgcctggtccaaggaactggcatc

SEQ ID NO: 1207 - RNA, 133 nt, synthetic construct
  source 1..133: mol_type = other RNA
gctaggggatgccagttcctgttttagagctagaaatagcaagttaaaataaggctagtccgttatcaacttgaaaaagtggcaccgagtcggtgcaagttaattatgtgcctggtccaaggaactggcatcc

SEQ ID NO: 1208 - RNA, 134 nt, synthetic construct
  source 1..134: mol_type = other RNA
gctaggggatgccagttcctgttttagagctagaaatagcaagttaaaataaggctagtccgttatcaacttgaaaaagtggcaccgagtcggtgcaagttaattatgtgcctggtccaaggaactggcatccc

SEQ ID NO: 1209 - RNA, 135 nt, synthetic construct
  source 1..135: mol_type = other RNA
gctaggggatgccagttcctgttttagagctagaaatagcaagttaaaataaggctagtccgttatcaacttgaaaaagtggcaccgagtcggtgcaagttaattatgtgcctggtccaaggaactggcatcccc

SEQ ID NO: 1210 - RNA, 136 nt, synthetic construct
  source 1..136: mol_type = other RNA
gctaggggatgccagttcctgttttagagctagaaatagcaagttaaaataaggctagtccgttatcaacttgaaaaagtggcaccgagtcggtgcaagttaattatgtgcctggtccaaggaactggcatcccct

SEQ ID NO: 1211 - RNA, 137 nt, synthetic construct
  source 1..137: mol_type = other RNA
gctaggggatgccagttcctgttttagagctagaaatagcaagttaaaataaggctagtccgttatcaacttgaaaaagtggcaccgagtcggtgcaagttaattatgtgcctggtccaaggaactggcatccccta

SEQ ID NO: 1212 - RNA, 133 nt, synthetic construct
  source 1..133: mol_type = other RNA
gctaggggatgccagttcctgttttagagctagaaatagcaagttaaaataaggctagtccgttatcaacttgaaaaagtggcaccgagtcggtgcaaagttaattatgtgcctggtccaaggaactggcatc

SEQ ID NO: 1213 - RNA, 134 nt, synthetic construct
  source 1..134: mol_type = other RNA
gctaggggatgccagttcctgttttagagctagaaatagcaagttaaaataaggctagtccgttatcaacttgaaaaagtggcaccgagtcggtgcaaagttaattatgtgcctggtccaaggaactggcatcc

SEQ ID NO: 1214 - RNA, 135 nt, synthetic construct
  source 1..135: mol_type = other RNA
gctaggggatgccagttcctgttttagagctagaaatagcaagttaaaataaggctagtccgttatcaacttgaaaaagtggcaccgagtcggtgcaaagttaattatgtgcctggtccaaggaactggcatccc

SEQ ID NO: 1215 - RNA, 136 nt, synthetic construct
  source 1..136: mol_type = other RNA
gctaggggatgccagttcctgttttagagctagaaatagcaagttaaaataaggctagtccgttatcaacttgaaaaagtggcaccgagtcggtgcaaagttaattatgtgcctggtccaaggaactggcatcccc

SEQ ID NO: 1216 - RNA, 137 nt, synthetic construct
  source 1..137: mol_type = other RNA
gctaggggatgccagttcctgttttagagctagaaatagcaagttaaaataaggctagtccgttatcaacttgaaaaagtggcaccgagtcggtgcaaagttaattatgtgcctggtccaaggaactggcatcccct

SEQ ID NO: 1217 - RNA, 138 nt, synthetic construct
  source 1..138: mol_type = other RNA
gctaggggatgccagttcctgttttagagctagaaatagcaagttaaaataaggctagtccgttatcaacttgaaaaagtggcaccgagtcggtgcaaagttaattatgtgcctggtccaaggaactggcatccccta

SEQ ID NO: 1218 - RNA, 134 nt, synthetic construct
  source 1..134: mol_type = other RNA
gctaggggatgccagttcctgttttagagctagaaatagcaagttaaaataaggctagtccgttatcaacttgaaaaagtggcaccgagtcggtgctaaagttaattatgtgcctggtccaaggaactggcatc

SEQ ID NO: 1219 - RNA, 135 nt, synthetic construct
  source 1..135: mol_type = other RNA
gctaggggatgccagttcctgttttagagctagaaatagcaagttaaaataaggctagtccgttatcaacttgaaaaagtggcaccgagtcggtgctaaagttaattatgtgcctggtccaaggaactggcatcc

SEQ ID NO: 1220 - RNA, 136 nt, synthetic construct
  source 1..136: mol_type = other RNA
gctaggggatgccagttcctgttttagagctagaaatagcaagttaaaataaggctagtccgttatcaacttgaaaaagtggcaccgagtcggtgctaaagttaattatgtgcctggtccaaggaactggcatccc

SEQ ID NO: 1221 - RNA, 137 nt, synthetic construct
  source 1..137: mol_type = other RNA
gctaggggatgccagttcctgttttagagctagaaatagcaagttaaaataaggctagtccgttatcaacttgaaaaagtggcaccgagtcggtgctaaagttaattatgtgcctggtccaaggaactggcatcccc

SEQ ID NO: 1222 - RNA, 138 nt, synthetic construct
  source 1..138: mol_type = other RNA
gctaggggatgccagttcctgttttagagctagaaatagcaagttaaaataaggctagtccgttatcaacttgaaaaagtggcaccgagtcggtgctaaagttaattatgtgcctggtccaaggaactggcatcccct

SEQ ID NO: 1223 - RNA, 139 nt, synthetic construct
  source 1..139: mol_type = other RNA
gctaggggatgccagttcctgttttagagctagaaatagcaagttaaaataaggctagtccgttatcaacttgaaaaagtggcaccgagtcggtgctaaagttaattatgtgcctggtccaaggaactggcatccccta

SEQ ID NO: 1224 - RNA, 135 nt, synthetic construct
  source 1..135: mol_type = other RNA
gctaggggatgccagttcctgttttagagctagaaatagcaagttaaaataaggctagtccgttatcaacttgaaaaagtggcaccgagtcggtgcctaaagttaattatgtgcctggtccaaggaactggcatc

SEQ ID NO: 1225 - RNA, 136 nt, synthetic construct
  source 1..136: mol_type = other RNA
gctaggggatgccagttcctgttttagagctagaaatagcaagttaaaataaggctagtccgttatcaacttgaaaaagtggcaccgagtcggtgcctaaagttaattatgtgcctggtccaaggaactggcatcc

SEQ ID NO: 1226 - RNA, 137 nt, synthetic construct
  source 1..137: mol_type = other RNA
gctaggggatgccagttcctgttttagagctagaaatagcaagttaaaataaggctagtccgttatcaacttgaaaaagtggcaccgagtcggtgcctaaagttaattatgtgcctggtccaaggaactggcatccc

SEQ ID NO: 1227 - RNA, 138 nt, synthetic construct
  source 1..138: mol_type = other RNA
gctaggggatgccagttcctgttttagagctagaaatagcaagttaaaataaggctagtccgttatcaacttgaaaaagtggcaccgagtcggtgcctaaagttaattatgtgcctggtccaaggaactggcatcccc

SEQ ID NO: 1228 - RNA, 139 nt, synthetic construct
  source 1..139: mol_type = other RNA
gctaggggatgccagttcctgttttagagctagaaatagcaagttaaaataaggctagtccgttatcaacttgaaaaagtggcaccgagtcggtgcctaaagttaattatgtgcctggtccaaggaactggcatcccct

SEQ ID NO: 1229 - RNA, 140 nt, synthetic construct
  source 1..140: mol_type = other RNA
gctaggggatgccagttcctgttttagagctagaaatagcaagttaaaataaggctagtccgttatcaacttgaaaaagtggcaccgagtcggtgcctaaagttaattatgtgcctggtccaaggaactggcatccccta

SEQ ID NO: 1230 - RNA, 136 nt, synthetic construct
  source 1..136: mol_type = other RNA
gctaggggatgccagttcctgttttagagctagaaatagcaagttaaaataaggctagtccgttatcaacttgaaaaagtggcaccgagtcggtgccctaaagttaattatgtgcctggtccaaggaactggcatc

SEQ ID NO: 1231 - RNA, 137 nt, synthetic construct
  source 1..137: mol_type = other RNA
gctaggggatgccagttcctgttttagagctagaaatagcaagttaaaataaggctagtccgttatcaacttgaaaaagtggcaccgagtcggtgccctaaagttaattatgtgcctggtccaaggaactggcatcc

SEQ ID NO: 1232 - RNA, 138 nt, synthetic construct
  source 1..138: mol_type = other RNA
gctaggggatgccagttcctgttttagagctagaaatagcaagttaaaataaggctagtccgttatcaacttgaaaaagtggcaccgagtcggtgccctaaagttaattatgtgcctggtccaaggaactggcatccc

SEQ ID NO: 1233 - RNA, 139 nt, synthetic construct
  source 1..139: mol_type = other RNA
gctaggggatgccagttcctgttttagagctagaaatagcaagttaaaataaggctagtccgttatcaacttgaaaaagtggcaccgagtcggtgccctaaagttaattatgtgcctggtccaaggaactggcatcccc

SEQ ID NO: 1234 - RNA, 140 nt, synthetic construct
  source 1..140: mol_type = other RNA
gctaggggatgccagttcctgttttagagctagaaatagcaagttaaaataaggctagtccgttatcaacttgaaaaagtggcaccgagtcggtgccctaaagttaattatgtgcctggtccaaggaactggcatcccct

SEQ ID NO: 1235 - RNA, 141 nt, synthetic construct
  source 1..141: mol_type = other RNA
gctaggggatgccagttcctgttttagagctagaaatagcaagttaaaataaggctagtccgttatcaacttgaaaaagtggcaccgagtcggtgccctaaagttaattatgtgcctggtccaaggaactggcatccccta

SEQ ID NO: 1236 - RNA, 20 nt, synthetic construct
  source 1..20: mol_type = other RNA
cctaaagttaattatgtacc

SEQ ID NO: 1237 - RNA, 20 nt, synthetic construct
  source 1..20: mol_type = other RNA
cctaaagttaattatgtacc

SEQ ID NO: 1238 - RNA, 20 nt, synthetic construct
  source 1..20: mol_type = other RNA
cctaaagttaattatgtacc

SEQ ID NO: 1239 - RNA, 20 nt, synthetic construct
  source 1..20: mol_type = other RNA
cctaaagttaattatgtacc

SEQ ID NO: 1240 - RNA, 20 nt, synthetic construct
  source 1..20: mol_type = other RNA
cctaaagttaattatgtacc

SEQ ID NO: 1241 - RNA, 20 nt, synthetic construct
  source 1..20: mol_type = other RNA
cctaaagttaattatgtacc

SEQ ID NO: 1242 - RNA, 20 nt, synthetic construct
  source 1..20: mol_type = other RNA
cctaaagttaattatgtacc

SEQ ID NO: 1243 - RNA, 20 nt, synthetic construct
  source 1..20: mol_type = other RNA
cctaaagttaattatgtacc

SEQ ID NO: 1244 - RNA, 20 nt, synthetic construct
  source 1..20: mol_type = other RNA
cctaaagttaattatgtacc

SEQ ID NO: 1245 - RNA, 20 nt, synthetic construct
  source 1..20: mol_type = other RNA
cctaaagttaattatgtacc

SEQ ID NO: 1246 - RNA, 20 nt, synthetic construct
  source 1..20: mol_type = other RNA
cctaaagttaattatgtacc

SEQ ID NO: 1247 - RNA, 20 nt, synthetic construct
  source 1..20: mol_type = other RNA
cctaaagttaattatgtacc

SEQ ID NO: 1248 - RNA, 20 nt, synthetic construct
  source 1..20: mol_type = other RNA
ggatgccagttccttggacc

SEQ ID NO: 1249 - RNA, 20 nt, synthetic construct
  source 1..20: mol_type = other RNA
ggatgccagttccttggacc

SEQ ID NO: 1250 - RNA, 20 nt, synthetic construct
  source 1..20: mol_type = other RNA
ggatgccagttccttggacc

SEQ ID NO: 1251 - RNA, 20 nt, synthetic construct
  source 1..20: mol_type = other RNA
ggatgccagttccttggacc

SEQ ID NO: 1252 - RNA, 20 nt, synthetic construct
  source 1..20: mol_type = other RNA
ggatgccagttccttggacc

SEQ ID NO: 1253 - RNA, 20 nt, synthetic construct
  source 1..20: mol_type = other RNA
ggatgccagttccttggacc

SEQ ID NO: 1254 - RNA, 20 nt, synthetic construct
  source 1..20: mol_type = other RNA
gctaggggatgccagttcct

SEQ ID NO: 1255 - RNA, 20 nt, synthetic construct
  source 1..20: mol_type = other RNA
gctaggggatgccagttcct

SEQ ID NO: 1256 - RNA, 20 nt, synthetic construct
  source 1..20: mol_type = other RNA
gctaggggatgccagttcct

SEQ ID NO: 1257 - RNA, 20 nt, synthetic construct
  source 1..20: mol_type = other RNA
gctaggggatgccagttcct

SEQ ID NO: 1258 - RNA, 20 nt, synthetic construct
  source 1..20: mol_type = other RNA
gctaggggatgccagttcct

SEQ ID NO: 1259 - RNA, 20 nt, synthetic construct
  source 1..20: mol_type = other RNA
gctaggggatgccagttcct

SEQ ID NO: 1260 - RNA, 20 nt, synthetic construct
  source 1..20: mol_type = other RNA
tgggcagcagtaagggctag

SEQ ID NO: 1261 - RNA, 20 nt, synthetic construct
  source 1..20: mol_type = other RNA
tgggcagcagtaagggctag

SEQ ID NO: 1262 - RNA, 20 nt, synthetic construct
  source 1..20: mol_type = other RNA
tgggcagcagtaagggctag

SEQ ID NO: 1263 - RNA, 20 nt, synthetic construct
  source 1..20: mol_type = other RNA
tgggcagcagtaagggctag

SEQ ID NO: 1264 - RNA, 20 nt, synthetic construct
  source 1..20: mol_type = other RNA
tgggcagcagtaagggctag

SEQ ID NO: 1265 - RNA, 20 nt, synthetic construct
  source 1..20: mol_type = other RNA
tgggcagcagtaagggctag

SEQ ID NO: 1266 - RNA, 20 nt, synthetic construct
  source 1..20: mol_type = other RNA
ttgggcagcagtaagggcta

SEQ ID NO: 1267 - RNA, 20 nt, synthetic construct
  source 1..20: mol_type = other RNA
ttgggcagcagtaagggcta

SEQ ID NO: 1268 - RNA, 20 nt, synthetic construct
  source 1..20: mol_type = other RNA
ttgggcagcagtaagggcta

SEQ ID NO: 1269 - RNA, 20 nt, synthetic construct
  source 1..20: mol_type = other RNA
ttgggcagcagtaagggcta

SEQ ID NO: 1270 - RNA, 20 nt, synthetic construct
  source 1..20: mol_type = other RNA
ttgggcagcagtaagggcta

SEQ ID NO: 1271 - RNA, 20 nt, synthetic construct
  source 1..20: mol_type = other RNA
ttgggcagcagtaagggcta

SEQ ID NO: 1272 - RNA, 20 nt, synthetic construct
  source 1..20: mol_type = other RNA
cctaaagttaattatgtacc

SEQ ID NO: 1273 - RNA, 20 nt, synthetic construct
  source 1..20: mol_type = other RNA
cctaaagttaattatgtacc

SEQ ID NO: 1274 - RNA, 20 nt, synthetic construct
  source 1..20: mol_type = other RNA
cctaaagttaattatgtacc

SEQ ID NO: 1275 - RNA, 20 nt, synthetic construct
  source 1..20: mol_type = other RNA
cctaaagttaattatgtacc

SEQ ID NO: 1276 - RNA, 20 nt, synthetic construct
  source 1..20: mol_type = other RNA
cctaaagttaattatgtacc

SEQ ID NO: 1277 - RNA, 20 nt, synthetic construct
  source 1..20: mol_type = other RNA
cctaaagttaattatgtacc

SEQ ID NO: 1278 - RNA, 20 nt, synthetic construct
  source 1..20: mol_type = other RNA
cctaaagttaattatgtacc

SEQ ID NO: 1279 - RNA, 20 nt, synthetic construct
  source 1..20: mol_type = other RNA
cctaaagttaattatgtacc

SEQ ID NO: 1280 - RNA, 20 nt, synthetic construct
  source 1..20: mol_type = other RNA
cctaaagttaattatgtacc

SEQ ID NO: 1281 - RNA, 20 nt, synthetic construct
  source 1..20: mol_type = other RNA
cctaaagttaattatgtacc

SEQ ID NO: 1282 - RNA, 20 nt, synthetic construct
  source 1..20: mol_type = other RNA
cctaaagttaattatgtacc

SEQ ID NO: 1283 - RNA, 20 nt, synthetic construct
  source 1..20: mol_type = other RNA
cctaaagttaattatgtacc

SEQ ID NO: 1284 - RNA, 20 nt, synthetic construct
  source 1..20: mol_type = other RNA
ggatgccagttccttggacc

SEQ ID NO: 1285 - RNA, 20 nt, synthetic construct
  source 1..20: mol_type = other RNA
ggatgccagttccttggacc

SEQ ID NO: 1286 - RNA, 20 nt, synthetic construct
  source 1..20: mol_type = other RNA
ggatgccagttccttggacc

SEQ ID NO: 1287 - RNA, 20 nt, synthetic construct
  source 1..20: mol_type = other RNA
ggatgccagttccttggacc

SEQ ID NO: 1288 - RNA, 20 nt, synthetic construct
  source 1..20: mol_type = other RNA
ggatgccagttccttggacc

SEQ ID NO: 1289 - RNA, 20 nt, synthetic construct
  source 1..20: mol_type = other RNA
ggatgccagttccttggacc

SEQ ID NO: 1290 - RNA, 20 nt, synthetic construct
  source 1..20: mol_type = other RNA
gctaggggatgccagttcct

SEQ ID NO: 1291 - RNA, 20 nt, synthetic construct
  source 1..20: mol_type = other RNA
gctaggggatgccagttcct

SEQ ID NO: 1292 - RNA, 20 nt, synthetic construct
  source 1..20: mol_type = other RNA
gctaggggatgccagttcct

SEQ ID NO: 1293 - RNA, 20 nt, synthetic construct
  source 1..20: mol_type = other RNA
gctaggggatgccagttcct

SEQ ID NO: 1294 - RNA, 20 nt, synthetic construct
  source 1..20: mol_type = other RNA
gctaggggatgccagttcct

SEQ ID NO: 1295 - RNA, 20 nt, synthetic construct
  source 1..20: mol_type = other RNA
gctaggggatgccagttcct

SEQ ID NO: 1296 - RNA, 20 nt, synthetic construct
  source 1..20: mol_type = other RNA
tgggcagcagtaagggctag

SEQ ID NO: 1297 - RNA, 20 nt, synthetic construct
  source 1..20: mol_type = other RNA
tgggcagcagtaagggctag

SEQ ID NO: 1298 - RNA, 20 nt, synthetic construct
  source 1..20: mol_type = other RNA
tgggcagcagtaagggctag

SEQ ID NO: 1299 - RNA, 20 nt, synthetic construct
  source 1..20: mol_type = other RNA
tgggcagcagtaagggctag

SEQ ID NO: 1300 - RNA, 20 nt, synthetic construct
  source 1..20: mol_type = other RNA
tgggcagcagtaagggctag

SEQ ID NO: 1301 - RNA, 20 nt, synthetic construct
  source 1..20: mol_type = other RNA
tgggcagcagtaagggctag

SEQ ID NO: 1302 - RNA, 20 nt, synthetic construct
  source 1..20: mol_type = other RNA
ttgggcagcagtaagggcta

SEQ ID NO: 1303 - RNA, 20 nt, synthetic construct
  source 1..20: mol_type = other RNA
ttgggcagcagtaagggcta

SEQ ID NO: 1304 - RNA, 20 nt, synthetic construct
  source 1..20: mol_type = other RNA
ttgggcagcagtaagggcta

SEQ ID NO: 1305 - RNA, 20 nt, synthetic construct
  source 1..20: mol_type = other RNA
ttgggcagcagtaagggcta

SEQ ID NO: 1306 - RNA, 20 nt, synthetic construct
  source 1..20: mol_type = other RNA
ttgggcagcagtaagggcta

SEQ ID NO: 1307 - RNA, 20 nt, synthetic construct
  source 1..20: mol_type = other RNA
ttgggcagcagtaagggcta

SEQ ID NO: 1308 - RNA, 92 nt, synthetic construct
  source 1..92: mol_type = other RNA
caccgtaattctaaaagtatgatgtagagctagaaatagcaagttaaaataaggctagtccgttatcaacttgaaaaagtggcaccgagtcg

SEQ ID NO: 1309 - RNA, 92 nt, synthetic construct
  source 1..92: mol_type = other RNA
caccgactttaggtatttattctgcagagctagaaatagcaagttaaaataaggctagtccgttatcaacttgaaaaagtggcaccgagtcg

SEQ ID NO: 1310 - RNA, 92 nt, synthetic construct
  source 1..92: mol_type = other RNA
caccgccaggcacataattaactttagagctagaaatagcaagttaaaataaggctagtccgttatcaacttgaaaaagtggcaccgagtcg

SEQ ID NO: 1311 - RNA, 91 nt, synthetic construct
  source 1..91: mol_type = other RNA
caccggatgccagttccttggaccagagctagaaatagcaagttaaaataaggctagtccgttatcaacttgaaaaagtggcaccgagtcg

SEQ ID NO: 1312 - RNA, 91 nt, synthetic construct
  source 1..91: mol_type = other RNA
caccgctaggggatgccagttcctagagctagaaatagcaagttaaaataaggctagtccgttatcaacttgaaaaagtggcaccgagtcg

SEQ ID NO: 1313 - RNA, 92 nt, synthetic construct
  source 1..92: mol_type = other RNA
caccgtgggcagcagtaagggctagagagctagaaatagcaagttaaaataaggctagtccgttatcaacttgaaaaagtggcaccgagtcg

SEQ ID NO: 1314 - RNA, 92 nt, synthetic construct
  source 1..92: mol_type = other RNA
caccgttgggcagcagtaagggctaagagctagaaatagcaagttaaaataaggctagtccgttatcaacttgaaaaagtggcaccgagtcg

SEQ ID NO: 1315 - RNA, 92 nt, synthetic construct
  source 1..92: mol_type = other RNA
caccgtttgggcagcagtaagggctagagctagaaatagcaagttaaaataaggctagtccgttatcaacttgaaaaagtggcaccgagtcg

SEQ ID NO: 1316 - RNA, 92 nt, synthetic construct
  source 1..92: mol_type = other RNA
caccgcaatctttgggcagcagtaaagagctagaaatagcaagttaaaataaggctagtccgttatcaacttgaaaaagtggcaccgagtcg

SEQ ID NO: 1317 - RNA, 92 nt, synthetic construct
  source 1..92: mol_type = other RNA
caccgccaatctttgggcagcagtaagagctagaaatagcaagttaaaataaggctagtccgttatcaacttgaaaaagtggcaccgagtcg

SEQ ID NO: 1318 - RNA, 91 nt, synthetic construct
  source 1..91: mol_type = other RNA
caccgcaactctcttccaatctttagagctagaaatagcaagttaaaataaggctagtccgttatcaacttgaaaaagtggcaccgagtcg

SEQ ID NO: 1319 - RNA, 92 nt, synthetic construct
  source 1..92: mol_type = other RNA
caccgagcaactctcttccaatcttagagctagaaatagcaagttaaaataaggctagtccgttatcaacttgaaaaagtggcaccgagtcg

SEQ ID NO: 1320 - RNA, 92 nt, synthetic construct
  source 1..92: mol_type = other RNA
caccgcctaaagttaattatgtgccagagctagaaatagcaagttaaaataaggctagtccgttatcaacttgaaaaagtggcaccgagtcg

SEQ ID NO: 1321 - RNA, 92 nt, synthetic construct
  source 1..92: mol_type = other RNA
caccgttaattatgtgcctggtccaagagctagaaatagcaagttaaaataaggctagtccgttatcaacttgaaaaagtggcaccgagtcg

SEQ ID NO: 1322 - RNA, 92 nt, synthetic construct
  source 1..92: mol_type = other RNA
caccgatgtgcctggtccaaggaacagagctagaaatagcaagttaaaataaggctagtccgttatcaacttgaaaaagtggcaccgagtcg

SEQ ID NO: 1323 - RNA, 92 nt, synthetic construct
  source 1..92: mol_type = other RNA
caccgccttactgctgcccaaagatagagctagaaatagcaagttaaaataaggctagtccgttatcaacttgaaaaagtggcaccgagtcg

SEQ ID NO: 1324 - RNA, 92 nt, synthetic construct
  source 1..92: mol_type = other RNA
caccgagattggaagagagttgctgagagctagaaatagcaagttaaaataaggctagtccgttatcaacttgaaaaagtggcaccgagtcg

SEQ ID NO: 1325 - RNA, 92 nt, synthetic construct
  source 1..92: mol_type = other RNA
caccgaagagagttgctgaggattcagagctagaaatagcaagttaaaataaggctagtccgttatcaacttgaaaaagtggcaccgagtcg

SEQ ID NO: 1326 - RNA, 92 nt, synthetic construct; identical to SEQ ID NO: 1320
  source 1..92: mol_type = other RNA

SEQ ID NO: 1327 - RNA, 92 nt, synthetic construct; identical to SEQ ID NO: 1321
  source 1..92: mol_type = other RNA

SEQ ID NO: 1328 - RNA, 92 nt, synthetic construct; identical to SEQ ID NO: 1322
  source 1..92: mol_type = other RNA

SEQ ID NO: 1329 - RNA, 92 nt, synthetic construct; identical to SEQ ID NO: 1323
  source 1..92: mol_type = other RNA

SEQ ID NO: 1330 - RNA, 92 nt, synthetic construct; identical to SEQ ID NO: 1324
  source 1..92: mol_type = other RNA

SEQ ID NO: 1331 - RNA, 92 nt, synthetic construct; identical to SEQ ID NO: 1325
  source 1..92: mol_type = other RNA

SEQ ID NO: 1332 - RNA, 92 nt, synthetic construct; identical to SEQ ID NO: 1320
  source 1..92: mol_type = other RNA

SEQ ID NO: 1333 - RNA, 92 nt, synthetic construct; identical to SEQ ID NO: 1321
  source 1..92: mol_type = other RNA

SEQ ID NO: 1334 - RNA, 92 nt, synthetic construct; identical to SEQ ID NO: 1322
  source 1..92: mol_type = other RNA

SEQ ID NO: 1335 - RNA, 92 nt, synthetic construct; identical to SEQ ID NO: 1323
  source 1..92: mol_type = other RNA

SEQ ID NO: 1336 - RNA, 92 nt, synthetic construct; identical to SEQ ID NO: 1324
  source 1..92: mol_type = other RNA

SEQ ID NO: 1337 - RNA, 92 nt, synthetic construct; identical to SEQ ID NO: 1325
  source 1..92: mol_type = other RNA

SEQ ID NO: 1338 - RNA, 92 nt, synthetic construct; identical to SEQ ID NO: 1320
  source 1..92: mol_type = other RNA

SEQ ID NO: 1339 - RNA, 92 nt, synthetic construct; identical to SEQ ID NO: 1321
  source 1..92: mol_type = other RNA

SEQ ID NO: 1340 - RNA, 92 nt, synthetic construct; identical to SEQ ID NO: 1322
  source 1..92: mol_type = other RNA

SEQ ID NO: 1341 - RNA, 92 nt, synthetic construct; identical to SEQ ID NO: 1323
  source 1..92: mol_type = other RNA

SEQ ID NO: 1342 - RNA, 92 nt, synthetic construct; identical to SEQ ID NO: 1324
  source 1..92: mol_type = other RNA

SEQ ID NO: 1343 - RNA, 92 nt, synthetic construct; identical to SEQ ID NO: 1325
  source 1..92: mol_type = other RNA

SEQ ID NO: 1344 - RNA, 100 nt, synthetic construct
  source 1..100: mol_type = other RNA
taattctaaaagtatgatgtgttttagagctagaaatagcaagttaaaataaggctagtccgttatcaacttgaaaaagtggcaccgagtcggtgctttt

SEQ ID NO: 1345 - RNA, 100 nt, synthetic construct
  source 1..100: mol_type = other RNA
actttaggtatttattctgcgttttagagctagaaatagcaagttaaaataaggctagtccgttatcaacttgaaaaagtggcaccgagtcggtgctttt

SEQ ID NO: 1346 - RNA, 100 nt, synthetic construct
  source 1..100: mol_type = other RNA
gccaggacataattaactttgttttagagctagaaatagcaagttaaaataaggctagtccgttatcaacttgaaaaagtggcaccgagtcggtgctttt

SEQ ID NO: 1347 - RNA, 100 nt, synthetic construct
  source 1..100: mol_type = other RNA
ggatgccagttccttggaccgttttagagctagaaatagcaagttaaaataaggctagtccgttatcaacttgaaaaagtggcaccgagtcggtgctttt

SEQ ID NO: 1348 - RNA, 100 nt, synthetic construct
  source 1..100: mol_type = other RNA
gctaggggatgccagttcctgttttagagctagaaatagcaagttaaaataaggctagtccgttatcaacttgaaaaagtggcaccgagtcggtgctttt

SEQ ID NO: 1349 - RNA, 100 nt, synthetic construct
  source 1..100: mol_type = other RNA
tgggcagcagtaagggctaggttttagagctagaaatagcaagttaaaataaggctagtccgttatcaacttgaaaaagtggcaccgagtcggtgctttt

SEQ ID NO: 1350 - RNA, 100 nt, synthetic construct
  source 1..100: mol_type = other RNA
ttgggcagcagtaagggctagttttagagctagaaatagcaagttaaaataaggctagtccgttatcaacttgaaaaagtggcaccgagtcggtgctttt

SEQ ID NO: 1351 - RNA, 100 nt, synthetic construct
  source 1..100: mol_type = other RNA
tttgggcagcagtaagggctgttttagagctagaaatagcaagttaaaataaggctagtccgttatcaacttgaaaaagtggcaccgagtcggtgctttt

SEQ ID NO: 1352 - RNA, 100 nt, synthetic construct
  source 1..100: mol_type = other RNA
caatctttgggcagcagtaagttttagagctagaaatagcaagttaaaataaggctagtccgttatcaacttgaaaaagtggcaccgagtcggtgctttt

SEQ ID NO: 1353 - RNA, 100 nt, synthetic construct
  source 1..100: mol_type = other RNA
ccaatctttgggcagcagtagttttagagctagaaatagcaagttaaaataaggctagtccgttatcaacttgaaaaagtggcaccgagtcggtgctttt

SEQ ID NO: 1354 - RNA, 100 nt, synthetic construct
  source 1..100: mol_type = other RNA
gcaactctcttccaatctttgttttagagctagaaatagcaagttaaaataaggctagtccgttatcaacttgaaaaagtggcaccgagtcggtgctttt

SEQ ID NO: 1355 - RNA, 100 nt, synthetic construct
  source 1..100: mol_type = other RNA
agcaactctcttccaatcttgttttagagctagaaatagcaagttaaaataaggctagtccgttatcaacttgaaaaagtggcaccgagtcggtgctttt

SEQ ID NO: 1356 - RNA, 100 nt, synthetic construct
  source 1..100: mol_type = other RNA
cctaaagttaattatgtgccgttttagagctagaaatagcaagttaaaataaggctagtccgttatcaacttgaaaaagtggcaccgagtcggtgctttt

SEQ ID NO: 1357 - RNA, 100 nt, synthetic construct
  source 1..100: mol_type = other RNA
ttaattatgtgcctggtccagttttagagctagaaatagcaagttaaaataaggctagtccgttatcaacttgaaaaagtggcaccgagtcggtgctttt

SEQ ID NO: 1358 - RNA, 100 nt, synthetic construct
  source 1..100: mol_type = other RNA
atgtgcctggtccaaggaacgttttagagctagaaatagcaagttaaaataaggctagtccgttatcaacttgaaaaagtggcaccgagtcggtgctttt

SEQ ID NO: 1359 - RNA, 100 nt, synthetic construct
  source 1..100: mol_type = other RNA
ccttactgctgcccaaagatgttttagagctagaaatagcaagttaaaataaggctagtccgttatcaacttgaaaaagtggcaccgagtcggtgctttt

SEQ ID NO: 1360 - RNA, 100 nt, synthetic construct
  source 1..100: mol_type = other RNA
agattggaagagagttgctggttttagagctagaaatagcaagttaaaataaggctagtccgttatcaacttgaaaaagtggcaccgagtcggtgctttt

SEQ ID NO: 1361 - RNA, 100 nt, synthetic construct
  source 1..100: mol_type = other RNA
aagagagttgctgaggattcgttttagagctagaaatagcaagttaaaataaggctagtccgttatcaacttgaaaaagtggcaccgagtcggtgctttt

SEQ ID NO: 1362 - RNA, 100 nt, synthetic construct; identical to SEQ ID NO: 1356
  source 1..100: mol_type = other RNA

SEQ ID NO: 1363 - RNA, 100 nt, synthetic construct; identical to SEQ ID NO: 1357
  source 1..100: mol_type = other RNA

SEQ ID NO: 1364 - RNA, 100 nt, synthetic construct; identical to SEQ ID NO: 1358
  source 1..100: mol_type = other RNA

SEQ ID NO: 1365 - RNA, 100 nt, synthetic construct; identical to SEQ ID NO: 1359
  source 1..100: mol_type = other RNA

SEQ ID NO: 1366 - RNA, 100 nt, synthetic construct; identical to SEQ ID NO: 1360
  source 1..100: mol_type = other RNA

SEQ ID NO: 1367 - RNA, 100 nt, synthetic construct; identical to SEQ ID NO: 1361
  source 1..100: mol_type = other RNA

SEQ ID NO: 1368 - RNA, 100 nt, synthetic construct; identical to SEQ ID NO: 1356
  source 1..100: mol_type = other RNA

SEQ ID NO: 1369 - RNA, 100 nt, synthetic construct; identical to SEQ ID NO: 1357
  source 1..100: mol_type = other RNA

SEQ ID NO: 1370 - RNA, 100 nt, synthetic construct; identical to SEQ ID NO: 1358
  source 1..100: mol_type = other RNA

SEQ ID NO: 1371 - RNA, 100 nt, synthetic construct; identical to SEQ ID NO: 1359
  source 1..100: mol_type = other RNA

SEQ ID NO: 1372 - RNA, 100 nt, synthetic construct; identical to SEQ ID NO: 1360
  source 1..100: mol_type = other RNA

SEQ ID NO: 1373 - RNA, 100 nt, synthetic construct; identical to SEQ ID NO: 1361
  source 1..100: mol_type = other RNA

SEQ ID NO: 1374 - RNA, 100 nt, synthetic construct; identical to SEQ ID NO: 1356
  source 1..100: mol_type = other RNA

SEQ ID NO: 1375 - RNA, 100 nt, synthetic construct; identical to SEQ ID NO: 1357
  source 1..100: mol_type = other RNA

SEQ ID NO: 1376 - RNA, 100 nt, synthetic construct; identical to SEQ ID NO: 1358
  source 1..100: mol_type = other RNA

SEQ ID NO: 1377 - RNA, 100 nt, synthetic construct; identical to SEQ ID NO: 1359
  source 1..100: mol_type = other RNA

SEQ ID NO: 1378 - RNA, 100 nt, synthetic construct; identical to SEQ ID NO: 1360
  source 1..100: mol_type = other RNA

SEQ ID NO: 1379 - RNA, 100 nt, synthetic construct; identical to SEQ ID NO: 1361
  source 1..100: mol_type = other RNA

SEQ ID NO: 1380 - RNA, 20 nt, synthetic construct
  source 1..20: mol_type = other RNA
taattctaaaagtatgatgt

SEQ ID NO: 1381 - RNA, 20 nt, synthetic construct
  source 1..20: mol_type = other RNA
actttaggtatttattctgc

SEQ ID NO: 1382 - RNA, 20 nt, synthetic construct
  source 1..20: mol_type = other RNA
gccaggacataattaacttt

SEQ ID NO: 1383 - RNA, 20 nt, synthetic construct
  source 1..20: mol_type = other RNA
ggatgccagttccttggacc

SEQ ID NO: 1384 - RNA, 20 nt, synthetic construct
  source 1..20: mol_type = other RNA
gctaggggatgccagttcct

SEQ ID NO: 1385 - RNA, 20 nt, synthetic construct
  source 1..20: mol_type = other RNA
tgggcagcagtaagggctag

SEQ ID NO: 1386 - RNA, 20 nt, synthetic construct
  source 1..20: mol_type = other RNA
ttgggcagcagtaagggcta

SEQ ID NO: 1387 - RNA, 20 nt, synthetic construct
  source 1..20: mol_type = other RNA
tttgggcagcagtaagggct

SEQ ID NO: 1388 - RNA, 20 nt, synthetic construct
  source 1..20: mol_type = other RNA
caatctttgggcagcagtaa

SEQ ID NO: 1389 - RNA, 20 nt, synthetic construct
  source 1..20: mol_type = other RNA
ccaatctttgggcagcagta

SEQ ID NO: 1390 - RNA, 20 nt, synthetic construct
  source 1..20: mol_type = other RNA
gcaactctcttccaatcttt

SEQ ID NO: 1391 - RNA, 20 nt, synthetic construct
  source 1..20: mol_type = other RNA
agcaactctcttccaatctt

SEQ ID NO: 1392 - RNA, 20 nt, synthetic construct
  source 1..20: mol_type = other RNA
cctaaagttaattatgtgcc

SEQ ID NO: 1393 - RNA, 20 nt, synthetic construct
  source 1..20: mol_type = other RNA
ttaattatgtgcctggtcca

SEQ ID NO: 1394 - RNA, 20 nt, synthetic construct
  source 1..20: mol_type = other RNA
atgtgcctggtccaaggaac

SEQ ID NO: 1395 - RNA, 20 nt, synthetic construct
  source 1..20: mol_type = other RNA
ccttactgctgcccaaagat

SEQ ID NO: 1396 - RNA, 20 nt, synthetic construct
  source 1..20: mol_type = other RNA
agattggaagagagttgctg

SEQ ID NO: 1397 - RNA, 20 nt, synthetic construct
  source 1..20: mol_type = other RNA
aagagagttgctgaggattc

SEQ ID NO: 1398 - RNA, 20 nt, synthetic construct
  source 1..20: mol_type = other RNA
cctaaagttaattatgtgcc

SEQ ID NO: 1399 - RNA, 20 nt, synthetic construct
  source 1..20: mol_type = other RNA
ttaattatgtgcctggtcca

SEQ ID NO: 1400 - RNA, 20 nt, synthetic construct
  source 1..20: mol_type = other RNA
atgtgcctggtccaaggaac

SEQ ID NO: 1401 - RNA, 20 nt, synthetic construct
  source 1..20: mol_type = other RNA
ccttactgctgcccaaagat

SEQ ID NO: 1402 - RNA, 20 nt, synthetic construct
  source 1..20: mol_type = other RNA
agattggaagagagttgctg

SEQ ID NO: 1403 - RNA, 20 nt, synthetic construct
  source 1..20: mol_type = other RNA
aagagagttgctgaggattc

SEQ ID NO: 1404 - RNA, 20 nt, synthetic construct
  source 1..20: mol_type = other RNA
cctaaagttaattatgtgcc

SEQ ID NO: 1405 - RNA, 20 nt, synthetic construct
  source 1..20: mol_type = other RNA
ttaattatgtgcctggtcca

SEQ ID NO: 1406 - RNA, 20 nt, synthetic construct
  source 1..20: mol_type = other RNA
atgtgcctggtccaaggaac

SEQ ID NO: 1407 - RNA, 20 nt, synthetic construct
  source 1..20: mol_type = other RNA
ccttactgctgcccaaagat

SEQ ID NO: 1408 - RNA, 20 nt, synthetic construct
  source 1..20: mol_type = other RNA
agattggaagagagttgctg

SEQ ID NO: 1409 - RNA, 20 nt, synthetic construct
  source 1..20: mol_type = other RNA
aagagagttgctgaggattc

SEQ ID NO: 1410 - RNA, 20 nt, synthetic construct
  source 1..20: mol_type = other RNA
cctaaagttaattatgtgcc

SEQ ID NO: 1411 - RNA, 20 nt, synthetic construct
  source 1..20: mol_type = other RNA
ttaattatgtgcctggtcca

SEQ ID NO: 1412 - RNA, 20 nt, synthetic construct
  source 1..20: mol_type = other RNA
atgtgcctggtccaaggaac

SEQ ID NO: 1413 - RNA, 20 nt, synthetic construct
  source 1..20: mol_type = other RNA
ccttactgctgcccaaagat

SEQ ID NO: 1414 - RNA, 20 nt, synthetic construct
  source 1..20: mol_type = other RNA
agattggaagagagttgctg

SEQ ID NO: 1415 - RNA, 20 nt, synthetic construct
  source 1..20: mol_type = other RNA
aagagagttgctgaggattc

SEQ ID NO: 1416 - RNA, 20 nt, synthetic construct
  source 1..20: mol_type = other RNA
taattctaaaagtatgatgt

SEQ ID NO: 1417 - RNA, 20 nt, synthetic construct
  source 1..20: mol_type = other RNA
actttaggtatttattctgc

SEQ ID NO: 1418 - RNA, 20 nt, synthetic construct
  source 1..20: mol_type = other RNA
gccaggacataattaacttt

SEQ ID NO: 1419 - RNA, 20 nt, synthetic construct
  source 1..20: mol_type = other RNA
ggatgccagttccttggacc

SEQ ID NO: 1420 - RNA, 20 nt, synthetic construct
  source 1..20: mol_type = other RNA
gctaggggatgccagttcct

SEQ ID NO: 1421 - RNA, 20 nt, synthetic construct
  source 1..20: mol_type = other RNA
tgggcagcagtaagggctag

SEQ ID NO: 1422 - RNA, 20 nt, synthetic construct
  source 1..20: mol_type = other RNA
ttgggcagcagtaagggcta

SEQ ID NO: 1423 - RNA, 20 nt, synthetic construct
  source 1..20: mol_type = other RNA
tttgggcagcagtaagggct

SEQ ID NO: 1424 - RNA, 20 nt, synthetic construct
  source 1..20: mol_type = other RNA
caatctttgggcagcagtaa

SEQ ID NO: 1425 - RNA, 20 nt, synthetic construct
  source 1..20: mol_type = other RNA
ccaatctttgggcagcagta

SEQ ID NO: 1426 - RNA, 20 nt, synthetic construct
  source 1..20: mol_type = other RNA
gcaactctcttccaatcttt

SEQ ID NO: 1427 - RNA, 20 nt, synthetic construct
  source 1..20: mol_type = other RNA
agcaactctcttccaatctt

SEQ ID NO: 1428 - RNA, 20 nt, synthetic construct
  source 1..20: mol_type = other RNA
cctaaagttaattatgtgcc

SEQ ID NO: 1429 - RNA, 20 nt, synthetic construct
  source 1..20: mol_type = other RNA
ttaattatgtgcctggtcca

SEQ ID NO: 1430 - RNA, 20 nt, synthetic construct
  source 1..20: mol_type = other RNA
atgtgcctggtccaaggaac

SEQ ID NO: 1431 - RNA, 20 nt, synthetic construct
  source 1..20: mol_type = other RNA
ccttactgctgcccaaagat

SEQ ID NO: 1432 - RNA, 20 nt, synthetic construct
  source 1..20: mol_type = other RNA
agattggaagagagttgctg

SEQ ID NO: 1433 - RNA, 20 nt, synthetic construct
  source 1..20: mol_type = other RNA
aagagagttgctgaggattc

SEQ ID NO: 1434 - RNA, 20 nt, synthetic construct
  source 1..20: mol_type = other RNA
cctaaagttaattatgtgcc

SEQ ID NO: 1435 - RNA, 20 nt, synthetic construct
  source 1..20: mol_type = other RNA
ttaattatgtgcctggtcca

SEQ ID NO: 1436 - RNA, 20 nt, synthetic construct
  source 1..20: mol_type = other RNA
atgtgcctggtccaaggaac

SEQ ID NO: 1437 - RNA, 20 nt, synthetic construct
  source 1..20: mol_type = other RNA
ccttactgctgcccaaagat

SEQ ID NO: 1438 - RNA, 20 nt, synthetic construct
  source 1..20: mol_type = other RNA
agattggaagagagttgctg

SEQ ID NO: 1439 - RNA, 20 nt, synthetic construct
  source 1..20: mol_type = other RNA
aagagagttgctgaggattc

SEQ ID NO: 1440 - RNA, 20 nt, synthetic construct
  source 1..20: mol_type = other RNA
cctaaagttaattatgtgcc

SEQ ID NO: 1441 - RNA, 20 nt, synthetic construct
  source 1..20: mol_type = other RNA
ttaattatgtgcctggtcca

SEQ ID NO: 1442 - RNA, 20 nt, synthetic construct
  source 1..20: mol_type = other RNA
atgtgcctggtccaaggaac

SEQ ID NO: 1443 - RNA, 20 nt, synthetic construct
  source 1..20: mol_type = other RNA
ccttactgctgcccaaagat

SEQ ID NO: 1444 - RNA, 20 nt, synthetic construct
  source 1..20: mol_type = other RNA
agattggaagagagttgctg

SEQ ID NO: 1445 - RNA, 20 nt, synthetic construct
  source 1..20: mol_type = other RNA
aagagagttgctgaggattc

SEQ ID NO: 1446 - RNA, 20 nt, synthetic construct
  source 1..20: mol_type = other RNA
cctaaagttaattatgtgcc

SEQ ID NO: 1447 - RNA, 20 nt, synthetic construct
  source 1..20: mol_type = other RNA
ttaattatgtgcctggtcca

SEQ ID NO: 1448 - RNA, 20 nt, synthetic construct
  source 1..20: mol_type = other RNA
atgtgcctggtccaaggaac

SEQ ID NO: 1449 - RNA, 20 nt, synthetic construct
  source 1..20: mol_type = other RNA
ccttactgctgcccaaagat

SEQ ID NO: 1450 - RNA, 20 nt, synthetic construct
  source 1..20: mol_type = other RNA
agattggaagagagttgctg

SEQ ID NO: 1451 - RNA, 20 nt, synthetic construct
  source 1..20: mol_type = other RNA
aagagagttgctgaggattc

SEQ ID NO: 1452 - RNA, 80 nt, synthetic construct; identical to SEQ ID NO: 317
  source 1..80: mol_type = other RNA

What is claimed:

1. A method for producing a modified immune effector cell having reduced exhaustion after antigen exposure relative to an unedited immune effector cell, the method comprising contacting the cell with:
(i) a base editor, or a polynucleotide encoding the base editor, wherein the base editor comprises a programmable DNA binding domain and a deaminase domain;
(ii) a guide polynucleotide, or a polynucleotide encoding the guide polynucleotide, wherein the guide polynucleotide directs the base editor to effect a nucleobase alteration in a polynucleotide encoding a polypeptide selected from the group consisting of Roquin-1, ARID1A, BATF, CBLB, CD5, Chop, CISH, DCK, DGKα, DGKζ, DHX37, DNMT3A, EIF2A, FLI-1, ID3, IKZF2, IL-6, PFN1, PRDM1, PRKACA, PTP1B, PTPN6, RASA2, Regnase-1, SOCS1, SOX4, TLE, TMEM184B, and TMEM222; and
(iii) a guide polynucleotide, or a polynucleotide encoding the guide polynucleotide, wherein the guide polynucleotide directs the base editor to effect a nucleobase alteration in a polynucleotide encoding a polypeptide selected from the group consisting of beta-2-microglobulin (B2M), cluster of differentiation 3-epsilon (CD3e), cluster of differentiation 3-gamma (CD3g), class II major histocompatibility complex transactivator (CIITA), programmed cell death 1 (PD1), and T cell receptor constant region (TRAC);
wherein each nucleobase alteration effects a reduction in expression of the encoded polypeptide, thereby producing the modified immune effector cell.

2. The method of claim 1, further comprising expressing a chimeric antigen receptor in the cell.

3. The method of claim 2, further comprising contacting the cell with a guide polynucleotide, or a polynucleotide encoding the guide polynucleotide, wherein the guide polynucleotide directs the base editor to effect a nucleobase alteration in a polynucleotide encoding an antigen bound by the chimeric antigen receptor, wherein the nucleobase alteration effects a reduction in expression of the antigen.

4. The method of claim 1, wherein the base editing reduces expression of a set of polypeptides selected from:
a Roquin-1, DGKζ, or FLI-1 polypeptide in the cell;
a TRAC, B2M, and CIITA polypeptide in the cell;
a CD3g, B2M, and CIITA polypeptide in the cell; and
a PD1 polypeptide in the cell.

5. The method of claim 1, wherein the guide polynucleotide of (ii) is selected from the group consisting of EF8, EF1, EF2, EF3, EF4, EF5, EF6, EF7, EF9, EF10, EF11, EF12, EF13, EF14, EF15, EF16, EF17, EF18, EF19, EF20, EF21, EF22, EF23, EF24, EF25, EF26, EF27, EF28, EF29, EF46, EF47, EF48, EF49, EF50, EF51, EF52, EF53, EF54, EF55, EF56, EF57, EF58, EF59, EF60, EF61, EF62, EF63, EF64, EF65, EF66, EF67, EF68, EF69, EF70, EF71, EF72, EF73, EF74, EF75, EF76, EF77, EF85, EF86, EF87, EF88, EF89, EF90, EF91, EF92, EF93, EF94, EF95, EF96, EF97, EF98, EF99, EF100, EF101, EF102, EF103, EF104, EF105, EF106, EF107, EF108, EF109, EF110, EF111, EF112, EF113, EF114, EF115, EF116, EF117, EF118, EF119, and EF120.

6. A modified immune cell having reduced exhaustion after antigen exposure relative to an unedited immune effector cell, wherein the modified immune cell is produced according to the method of claim 1.

7. A modified immune cell having reduced exhaustion after antigen exposure relative to an unedited immune effector cell, the modified immune cell comprising a nucleobase alteration that reduces or eliminates expression of:
(i) a polypeptide selected from one or more of Roquin-1, ARID1A, BATF, CBLB, CD5, Chop, CISH, DCK, DGKa, DGK, DHX37, DNMT3A, EIF2A, FLI-1, ID3, IKZF2, IL-6, PFN1, PRDM1, PRKACA, PTP1B, PTPN6, RASA2, Regnase-1, SOCS1, SOX4, TLE, TMEM184B, and TMEM222; and
(ii) a polypeptide selected from the group consisting of beta-2-microglobulin (B2M), cluster of differentiation 3-epsilon (CD3e), cluster of differentiation 3-gamma (CD3g), class II major histocompatibility complex transactivator (CIITA), programmed cell death 1 (PD1), and T cell receptor constant region (TRAC).

8. The immune cell of claim 7, further comprising one or two chimeric antigen receptors targeting one or two antigens associated with a disease or disorder.

9. A modified immune effector cell having reduced exhaustion after antigen exposure relative to an unedited immune effector cell, wherein the modified immune effector cell expresses a chimeric antigen receptor targeting an antigen associated with a disease or disorder, and wherein the modified immune effector cell comprises reduced or undetectable expression of:
(i) one or more of Roquin-1, ARID1A, BATF, CBLB, CD5, Chop, CISH, DCK, DGKα, DGKζ, DHX37, DNMT3A, EIF2A, FLI-1, ID3, IKZF2, IL-6, PFN1, PRDM1, PRKACA, PTP1B, PTPN6, RASA2, Regnase-1, SOCS1, SOX4, TLE, TMEM184B, and TMEM222; and
(ii) one or more of beta-2-microglobulin (B2M), cluster of differentiation 3-epsilon (CD3e), cluster of differentiation 3-gamma (CD3g), class II major histocompatibility complex transactivator (CIITA), programmed cell death 1 (PD1), and T cell receptor constant region (TRAC).

10. The immune cell of claim 9, wherein the modified immune cell comprises reduced or undetectable expression of an antigen bound by the chimeric antigen receptor.

11. The immune cell of claim 9, wherein the modified immune cell comprises reduced or undetectable levels of expression of a polypeptide or a set or polypeptide selected from:
Roquin-1, DGKζ, or FLI-1 polypeptides;
TRAC, B2M, and CIITA polypeptides;
CD3g, B2M, and CIITA polypeptides; and
A PD1 polypeptide.

12. The immune cell of claim 9, wherein a population of the modified immune cells comprise:
an alteration in the ratio of CD4+ to CD8+ cells following one or more exposures to antigen relative to a population of unedited immune cells;
an increase in the proportion of CD4+ cells following one or more exposures to antigen relative to a population of unedited immune cells; an increase in CD25, ICOS, OX40, and/or CD28 expression following one or more exposures to antigen relative to an unedited immune cell.

13. A base editor system that comprises:
(i) a base editor, or a polynucleotide encoding the base editor, wherein the base editor comprises a programmable DNA binding domain and a deaminase domain;
(ii) a guide polynucleotide, or a polynucleotide encoding the guide polynucleotide, wherein the guide polynucleotide directs the base editor to effect a nucleobase alteration in a polynucleotide encoding a polypeptide selected from the group consisting of Roquin-1, ARID1A, BATF, CBLB, CD5, Chop, CISH, DCK, DGKα, DGKζ, DHX37, DNMT3A, EIF2A, FLI-1, ID3, IKZF2, IL-6, PFN1, PRDM1, PRKACA, PTP1B, PTPN6, RASA2, Regnase-1, SOCS1, SOX4, TLE, TMEM184B, and TMEM222; and
(iii) a guide polynucleotide, or a polynucleotide encoding the guide polynucleotide, wherein the guide polynucleotide directs the base editor to effect a nucleobase alteration in a polynucleotide encoding a polypeptide selected from the group consisting of beta-2-microglobulin (B2M), cluster of differentiation 3-epsilon (CD3e), cluster of differentiation 3-gamma (CD3g), class II major histocompatibility complex transactivator (CIITA), programmed cell death 1 (PD1), and T cell receptor constant region (TRAC).

14. The base editor system of claim 13, wherein the guide polynucleotide of (ii) comprises a polynucleotide sequence with at least about 85% sequence identity to a sequence selected from those listed in Table 1 or Table 2A, or a variant thereof comprising an extension or truncation 1, 2, 3, 4, or 5 nucleotides in length at the 3′ and/or 5′ end.

15. The base editor system of claim 13, wherein the guide polynucleotide of (ii) is selected from the group consisting of EF8, EF1, EF2, EF3, EF4, EF5, EF6, EF7, EF9, EF10, EF11, EF12, EF13, EF14, EF15, EF16, EF17, EF18, EF19, EF20, EF21, EF22, EF23, EF24, EF25, EF26, EF27, EF28, EF29, EF46, EF47, EF48, EF49, EF50, EF51, EF52, EF53, EF54, EF55, EF56, EF57, EF58, EF59, EF60, EF61, EF62, EF63, EF64, EF65, EF66, EF67, EF68, EF69, EF70, EF71, EF72, EF73, EF74, EF75, EF76, EF77, EF85, EF86, EF87, EF88, EF89, EF90, EF91, EF92, EF93, EF94, EF95, EF96, EF97, EF98, EF99, EF100, EF101, EF102, EF103, EF104, EF105, EF106, EF107, EF108, EF109, EF110, EF111, EF112, EF113, EF114, EF115, EF116, EF117, EF118, EF119, and EF120.

16. A cell comprising the base editor system of claim 13.

17. A vector or set of vectors comprising:
(i) a polynucleotide encoding a base editor, wherein the base editor comprises a programmable DNA binding domain and a deaminase domain;
(ii) a guide polynucleotide, or a polynucleotide encoding the guide polynucleotide, wherein the guide polynucleotide directs the base editor to effect a nucleobase alteration in a polynucleotide encoding a polypeptide selected from the group consisting of Roquin-1, ARID1A, BATF, CBLB, CD5, Chop, CISH, DCK, DGKα, DGKζ, DHX37, DNMT3A, EIF2A, FLI-1, ID3, IKZF2, IL-6, PFN1, PRDM1, PRKACA, PTP1B, PTPN6, RASA2, Regnase-1, SOCS1, SOX4, TLE, TMEM184B, and TMEM222; and
(iii) a guide polynucleotide, or a polynucleotide encoding the guide polynucleotide, wherein the guide polynucleotide directs the base editor to effect a nucleobase alteration in a polynucleotide encoding a polypeptide selected from the group consisting of beta-2-microglobulin (B2M), cluster of differentiation 3-epsilon (CD3e), cluster of differentiation 3-gamma (CD3g), class II major histocompatibility complex transactivator (CIITA), programmed cell death 1 (PD1), and T cell receptor constant region (TRAC).

18. A pharmaceutical composition comprising an effective amount of the modified immune cell of claim 9 and a pharmaceutically acceptable excipient.

19. A pharmaceutical composition comprising:
(i) a base editor, or a polynucleotide encoding the base editor, wherein the base editor comprises a programmable DNA binding domain and a deaminase domain;
(ii) a guide polynucleotide, or a polynucleotide encoding the guide polynucleotide, wherein the guide polynucleotide directs the base editor to effect a nucleobase alteration in a polynucleotide encoding a polypeptide selected from the group consisting of Roquin-1, ARID1A, BATF, CBLB, CD5, Chop, CISH, DCK, DGKα, DGKζ, DHX37, DNMT3A, EIF2A, FLI-1, ID3, IKZF2, IL-6, PFN1, PRDM1, PRKACA, PTP1B, PTPN6, RASA2, Regnase-1, SOCS1, SOX4, TLE, TMEM184B, and TMEM222; and
(iii) a guide polynucleotide, or a polynucleotide encoding the guide polynucleotide, wherein the guide polynucleotide directs the base editor to effect a nucleobase alteration in a polynucleotide encoding a polypeptide selected from the group consisting of beta-2-microglobulin (B2M), cluster of differentiation 3-epsilon (CD3e), cluster of differentiation 3-gamma (CD3g), class II major histocompatibility complex transactivator (CIITA), programmed cell death 1 (PD1), and T cell receptor constant region (TRAC).

20. A method of treating a disease or disorder in a subject, the method comprising administering to the subject an effective amount of a modified immune cell, the cell, or the pharmaceutical composition of claim 19.

21. A kit comprising a modified immune effector cell having reduced exhaustion after antigen exposure relative to an unedited immune effector cell, wherein the modified immune effector cell expresses a chimeric antigen receptor targeting an antigen associated with a disease or disorder, and wherein the modified immune effector cell comprises reduced or undetectable expression of:
(i) one or more of Roquin-1, ARID1A, BATF, CBLB, CD5, Chop, CISH, DCK, DGKα, DGKζ, DHX37, DNMT3A, EIF2A, FLI-1, ID3, IKZF2, IL-6, PFN1, PRDM1, PRKACA, PTP1B, PTPN6, RASA2, Regnase-1, SOCS1, SOX4, TLE, TMEM184B, and TMEM222; and
(ii) one or more of beta-2-microglobulin (B2M), cluster of differentiation 3-epsilon (CD3e), cluster of differentiation 3-gamma (CD3g), class II major histocompatibility complex transactivator (CIITA), programmed cell death 1 (PD1), and T cell receptor constant region (TRAC)
for use in the method of claim 20.

22. A method for producing a modified immune effector cell having reduced exhaustion after antigen exposure relative to an unedited immune effector cell, the method comprising contacting the cell with:
(i) a base editor, or a polynucleotide encoding the base editor, wherein the base editor comprises a programmable DNA binding domain and a deaminase domain;
(ii) a guide polynucleotide, or a polynucleotide encoding the guide polynucleotide, wherein the guide polynucleotide directs the base editor to effect a nucleobase alteration in a polynucleotide encoding a Roquin-1 polypeptide; and
(iii) a guide polynucleotide, or a polynucleotide encoding the guide polynucleotide, wherein the guide polynucleotide directs the base editor to effect a nucleobase alteration in a polynucleotide encoding a polypeptide selected from the group consisting of beta-2-microglobulin (B2M), cluster of differentiation 3-epsilon (CD3e), cluster of differentiation 3-gamma (CD3g), class II major histocompatibility complex transactivator (CIITA), programmed cell death 1 (PD1), and T cell receptor constant region (TRAC);
wherein each nucleobase alteration effects a reduction in expression of the encoded polypeptide, thereby producing the modified immune effector cell.

23. A method for reducing or eliminating the presence of a neoplasia in a subject, the method comprising administering to the subject a cell produced according to the method of claim 22, wherein the cell expresses a chimeric antigen receptor targeting an antigen associated with the neoplasia.
